(19) United States
(12) Patent Application Publication
(10) Pub. No.: US 2015/0216944 A1
(43) Pub. Date: Aug. 6, 2015

(54) ALLELIC VARIANTS OF HUMAN FACTOR VIII

(71) Applicant: HAPLOMICS, INC, Los Angeles, CA (US)

(72) Inventors: Thomas E Howard, Manhattan Beach, CA (US); Vincent La Terza, Atlanta, GA (US)

(73) Assignee: HAPLOMICS, INC, Los Angeles, CA (US)

(21) Appl. No.: 14/691,544

(22) Filed: Apr. 20, 2015

Related U.S. Application Data
(63) Continuation of application No. 11/720,945, filed on Mar. 24, 2010, now abandoned.
(60) Provisional application No. 60/737,779, filed on Nov. 16, 2005.
(60) Provisional application No. 60/634,065, filed on Dec. 6, 2004.

(51) Int. Cl. A61K 38/37

(52) U.S. Cl. CPC A61K 38/37

(57) ABSTRACT

Disclosed are compositions and methods related to Factor VIII.

### CROSS REFERENCE TO RELATED PATENT APPLICATIONS

[0001] This application claims priority to U.S. Provisional Application No. 60/634,065 filed Dec. 6, 2004, and U.S. Provisional Application No. Unassigned, entitled “Allelic Variants of Human Factor VIII” filed on Nov. 16, 2005, both of which are herein incorporated by reference in their entireties.

### I. BACKGROUND

[0002] Hemophilia is a congenital bleeding disorder. Patients with Hemophilia A have either absent, decreased or defective production of the blood clotting protein, Factor VIE (FVIII). Those with Hemophilia B have similar problems with Factor IX (FIX). Hemophilia is characterized as “severe” when the activity of the affected clotting factor (FVIII or FIX) is less than 1% of normal. Severe Hemophilia is often associated with spontaneous bleeding (i.e. bleeding not caused by trauma or injury). Hemophilia is termed “mild” when the relevant clotting factor activity is 6-24% of normal. Hemophilia is referred to as “moderate” when clotting factor activity is between 1% and 5% of normal. Approximately 70% of Hemophilia patients have severe disease and can require treatment for bleeding several times per month.

[0003] Most patients that have Hemophilia A or B are treated by replacing their missing coagulation factor with FVIII or FIX that is either derived from plasma or developed using recombinant technology. One of the most serious complications of the treatment of Hemophilia is the development of ‘inhibitors’. ‘Inhibitors’ are antibodies to FVIII or FIX that can develop in patients with Hemophilia following replacement therapy with the missing coagulation factor. The management of Hemophilia patients with inhibitors is difficult. Clinically, most inhibitors are detected when patients fail to respond to standard replacement therapy. Inhibitor levels are measured in Bethesda units (BU). In general a patient having a BU exceeding 10 is considered refractory to treatment with human FVIII.

[0004] Inhibitors are usually first detected using a sensitive clotting-based assay, variably referred to as an inhibitor screen or a mixing study. The coagulation factor specificity of the suspected inhibitor is next commonly determined by performing a set of clotting-based factor activity assays where each is specific for one of the candidate coagulation proteins potentially being targeted. The presence and specificity of an inhibitor is most often confirmed by performing the more specific clotting-based test known as the Bethesda assay. The plasma level (i.e. titer) of an inhibitor, likewise, is typically measured by the Bethesda assay, and is defined in terms of Bethesda units (BU).

[0005] Acquired Hemophilia is a spontaneous development of inhibitors to one's own FVIII. Acquired Hemophilia occurs in about one person per million. The underlying cause of inhibitor development in acquired hemophilia is unknown but is associated with many conditions including pregnancy, autoimmune disease, the use of certain medications or cancer Acquired Hemophilia A: A Concise Review Franchini et. al. American Journal of Hematology 80:55-63 (2005). Patients with acquired Hemophilia may present to the hospital as a result of a severe spontaneous bleeding episode. These bleeding episodes are very difficult to control, and will not typically respond to treatment with FVIII.

[0006] Treatment of Hemophilia patients (both A and B) and patients with other coagulation factor deficiencies is normally based on replacement therapy (substitution of the missing clotting factor).

[0007] The replacement clotting factors are typically obtained from human plasma or from recombinant (genetically engineered) preparations. Human plasma-derived clotting factors have the inherent risk of potentially transmitting certain viruses. Antibodies or ‘inhibitors’ can develop following treatment with either human plasma factor concentrates or recombinant clotting factor preparations. Alloantibodies react with the replacement fVIII product but not with the patient's endogenous fVIII. Occasionally patients develop autoantibodies in addition ti alloantibodies in response to infused fVIII. When this occurs a mild or moderate patient may become a severe patient. The development of inhibitors is very problematic as injected replacement therapy is frequently ‘neutralized’ or made ineffective by the inhibitor shortly after infusion. Treatment options are available for treating Hemophilia patients that develop inhibitors include are high dose FVIII or FIX treatment (to overcome the inhibitor), for hemophilia A NonvoSeven (rfVIIa) porcine FVIII (FVIII derived from the plasma of pigs) or bypassing agents such as prothrombin complex concentrates (PCCs) or activated prothrombin complex concentrates (e.g., FEIBA and other APCCs) which enhance the hemostatic process without the need of FVIII or FIX.

[0008] FVIII is also associated with other diseases and disorders, as outlined below. Elevated levels of FVIII are an important risk factor for venous thrombosis and may also be associated with arterial thrombosis. Thrombosis is the formation of a clot or thrombus inside a blood vessel, obstructing the flow of blood through the circulatory system. Thromboembolism is a general term describing both thrombosis and its main complication: dislodgement of a clot and embolization. Von Willebrand's disease is due to an abnormality, either quantitative or qualitative, of the Von Willebrand factor (vWF), which is a large multimeric glycoprotein that functions as the carrier protein for factor VIII (FVIII). vWF also is required for normal platelet adhesion. As such, vWF functions in both primary (involving platelet adhesion) and secondary (involving FVIII) hemostasis. In primary hemostasis, vWF binds on platelets to its specific receptor glycoprotein Ib and acts as an adhesive bridge between the platelets and damaged subendothelium at the site of vascular injury. In secondary hemostasis, vWF protects FVIII from degradation and delivers it to the site of injury. What is needed in the art are methods and compositions for screening for and treating diseases and disorders related to FVIII and in the case of hemophilia A less antigenic and less immunogenic fVIII replacement preparations and in the case of prothombotic fVIII improved means to neutralize coagulant activity.

### II. SUMMARY

[0009] Disclosed is a method of categorizing a haplotype in a FVIII gene comprising, amplifying regions of the FVIII gene, determining a haplotype of the FVIII gene from DNA sequence within the amplified regions, and categorizing the haplotype as being an H1 (SEQ ID NO: 1), H2 (SEQ ID NO: 2), H3 (SEQ ID NO: 3), H4 (SEQ ID NO: 4), H5 (SEQ ID NO: 5), or H6 (SEQ ID NO: 6).

[0010] Disclosed is a method of categorizing a haplotype in a FVIII gene comprising, detecting a FVIII protein and categorizing the haplotype of the FVIII gene encoding the detected FVIII protein as being an H1 (SEQ ID NO: 1), H2 (SEQ ID NO: 2), H3 (SEQ ID NO: 3), H4 (SEQ ID NO: 4), H5 (SEQ ID NO: 5), or H6 (SEQ ID NO: 6).

[0011] Disclosed is a method of reducing the generation of anti-FVI antibodies that inhibit or impair FVIII treatment comprising, detecting a haplotype in a FVIII gene in a subject, matching a replacement FVIII therapy to the detected haplotype, and administering the matched replacement FVIII therapy to the subject. The haplotype can be H1 (SEQ ID NO: 1), H2 (SEQ ID NO: 2), H3 (SEQ ID NO: 3), H4 (SEQ ID NO: 4), H5 (SEQ ID NO: 5), or H6 (SEQ ID NO: 6).

[0012] Disclosed is a method of preventing the generation of anti-FVIII antibodies that inhibit or impair FVIII treatment comprising, detecting a haplotype in a FVIII gene in a subject, matching a replacement FVIII therapy to the detected haplotype, and administering the matched replacement FVIII therapy to the subject. The haplotype can be H1 (SEQ ID NO: 1), H2 (SEQ ID NO: 2), H3 (SEQ ID NO: 3), H4 (SEQ ID NO: 4), H5 (SEQ ID NO: 5), or H6 (SEQ ID NO: 6).

[0013] Disclosed is a method of maximizing efficacy of transfusion therapy in a subject with a hemostatic disorder comprising, determining whether the FVIII haplotype of a subject having a hemostatic disorder is H1 (SEQ ID NO: 1), H2 (SEQ ID NO: 2), H3 (SEQ ID NO: 3), H4 (SEQ ID NO: 4), H5 (SEQ ID NO: 5), or H6 (SEQ ID NO: 6) and administering an appropriate transfusion product to the subject based on the results. The transfusion product can be a recombinant FVIII. The transfusion product can be plasma derived FVIII.

[0014] Disclosed is a method of administering a blood product to a subject in need of FVIII comprising, obtaining a haplotype in a FVIII gene of a blood product recipient, determining which type of blood product the recipient should receive, and administering to the subject in need thereof an appropriate blood product. The blood product can be pooled blood plasma derived from more than one blood donor. The blood product can be a plasma-derived FVIII preparation. The pooled blood plasma can be obtained by detecting a haplotype in a FVIII gene of a blood plasma donor and placing the blood plasma of the blood plasma donor in an appropriate FVIII haplotype pool based on the results.

[0015] Disclosed is a method of blood plasma pooling comprising, detecting a haplotype in a FVIII gene of a blood plasma donor and placing blood plasma of the blood plasma donor in an appropriate pool based on the results. Disclosed is a pooled blood plasma product obtained through this method.

[0016] Disclosed is a method of blood plasma pooling comprising, detecting a haplotype in a FVIII gene of a whole blood donor, receiving whole blood from the whole blood donor, separating plasma from the whole blood, and pooling the plasma with plasma obtained from other donors with the same where possible or most closely matched haplotype. Disclosed is a pooled blood plasma product obtained through this method.

[0017] Disclosed is a method of preparing a plasma-derived FVIII product comprising, determining the haplotype of blood plasma, wherein the haplotype is H1 (SEQ ID NO: 1), H2 (SEQ ID NO: 2), H3 (SEQ ID NO: 3), H4 (SEQ ID NO: 4), H5 (SEQ ID NO: 5), or H6 (SEQ ID NO: 6). and preparing a plasma-derived FVIII product from the haplotyped blood plasma wherein the resulting FVIII product is homogenous for single haplotype or enriched with selected haplotypes with respect to FVIII content. Disclosed is a plasma-derived FVIII product obtained through this method.

[0018] Disclosed is a method of treating a subject with a hemostatic disorder comprising, identifying a subject with a hemostatic disorder, determining the FVIII haplotype of the subject, wherein the haplotype is H1 (SEQ ID NO: 1), H2 (SEQ ID NO: 2), H3 (SEQ ID NO: 3), H4 (SEQ ID NO: 4), H5 (SEQ ID NO: 5), or H6 (SEQ ID NO: 6) and administering an appropriate FVIII gene replacement product to the subject based on the results. The hemostatic disorder can be congenital hemophilia A. The hemostatic disorder can be acquired hemophilia A.

[0019] Disclosed is a method of treating a subject with a hemostatic disorder comprising, identifying a subject with a hemostatic disorder, determining the FVIII haplotype of the subject, wherein the haplotype is H1 (SEQ ID NO: 1), H2 (SEQ ID NO: 2), H3 (SEQ ID NO: 3), H4 (SEQ ID NO: 4), H5 (SEQ ID NO: 5), or H6 (SEQ ID NO: 6) and administering an appropriate plasma-derived FVIII product to the subject based on the results. The hemostatic disorder can be congenital hemophilia A. The hemostatic disorder can be acquired hemophilia A.

[0020] Disclosed is a method of treating a subject with a hemostatic disorder comprising, identifying a subject with a hemostatic disorder, determining the FVIII haplotype of the subject, wherein the haplotype is H1 (SEQ ID NO: 1), H2 (SEQ ID NO: 2), H3 (SEQ ID NO: 3), H4 (SEQ ID NO: 4), H5 (SEQ ID NO: 5), or H6 (SEQ ID NO: 6) and administering an appropriate recombinant FVIII product to the subject based on the results. The hemostatic disorder can be congenital hemophilia A. The hemostatic disorder can be acquired hemophilia A.

[0021] Disclosed is a method for rapidly diagnosing a FVIII haplotype in a subject, comprising, obtaining a sample from the subject, analyzing the sample using rapid PCR, and determining a FVIII haplotype for the subject. The FVIII haplotype can be selected from the group consisting of H1 (SEQ ID NO: 1), H2 (SEQ ID NO: 2), H3 (SEQ ID NO: 3), H4 (SEQ ID NO: 4), H5 (SEQ ID NO: 5), or H6 (SEQ ID NO: 6). The subject can be diagnosed with congenital hemophilia A. The subject can be diagnosed with acquired hemophilia A.

[0022] Disclosed is a method of maximizing the sensitivity and specificity of clinical diagnostic algorithms for identifying a subject with a prothrombotic hemostatic disorder comprising, obtaining a sample from the subject, determining whether the FVIII haplotype of a subject having a hemostatic disorder is H1 (SEQ ID NO: 1), H2 (SEQ ID NO: 2), H3 (SEQ ID NO: 3), H4 (SEQ ID NO: 4), H5 (SEQ ID NO: 5), or H6 (SEQ ID NO: 6) and performing the appropriate additional laboratory diagnostic testing on the subject based on the results.

[0023] Disclosed is a method of treating a subject with a prothrombotic hemostatic disorder comprising, identifying a subject with a hemostatic disorder, determining the FVIII haplotype of the subject, wherein the haplotype is H1 (SEQ ID NO: 1), H2 (SEQ ID NO: 2), H3 (SEQ ID NO: 3), H4 (SEQ ID NO: 4), H5 (SEQ ID NO: 5), or H6 (SEQ ID NO: 6) and administering an appropriate anti-thrombotic prophylactic treatment regimen to the subject based on the results.

[0024] Disclosed are antibodies that target high risk haplotypes of FVIII. Disclosed are antibodies that target peptide regions unique to said high risk haplotypes. Disclosed are agents that neutralize the activity of high risk haplotypes. An agent can be, for example, a monoclonal antibody. Disclosed is an antibody to a polypeptide comprising the sequence as set forth in SEQ ID NO: 19. Disclosed is an n antibody to a polypeptide comprising the sequence as set forth in SEQ ID NO: 20. Disclosed is an n antibody to a polypeptide comprising the sequence as set forth in SEQ ID NO: 21. Disclosed is an n antibody to a polypeptide comprising the sequence as set forth in SEQ ID NO: 22. Disclosed is an antibody to a polypeptide comprising the sequence as set forth in SEQ ID NO: 23. Disclosed is an antibody to a polypeptide comprising the sequence as set forth in SEQ ID NO: 24.

[0025] Disclosed is a method of treating a subject with a prothrombotic hemostatic disorder comprising, identifying a subject with a prothrombotic hemostatic disorder, determining the FVIII haplotype of the subject, wherein the haplotype is H1 (SEQ ID NO: 1), H2 (SEQ ID NO: 2), H3 (SEQ ID NO: 3), H4 (SEQ ID NO: 4), H5 (SEQ ID NO: 5), or H6 (SEQ ID NO: 6) and administering an appropriate anti-thrombotic prophylactic treatment regimen to the subject based on the results. The hemostatic disorder can be congenital hemophilia A. The hemostatic disorder can be acquired hemophilia A.

[0026] Disclosed is a method of treating a subject with a hemostatic disorder comprising, identifying a subject with a hemostatic disorder, determining the FVIII haplotype of the subject, wherein the haplotype is H1 (SEQ ID NO: 1), H2 (SEQ ID NO: 2), H3 (SEQ ID NO: 3), H4 (SEQ ID NO: 4), H5 (SEQ ID NO: 5), or H6 (SEQ ID NO: 6), and administering an appropriate recombinant FVIII product to the subject based on the results.

[0027] Disclosed is a method for rapidly diagnosing a FVIII haplotype in a subject, comprising, obtaining a sample from the subject, analyzing the sample using FVIII haplotype specific antibodies, and determining a FVIII haplotype for the subject. The haplotype can be selected from the group consisting of H1 (SEQ ID NO: 1), H2 (SEQ ID NO: 2), H3 (SEQ ID NO: 3), H4 (SEQ ID NO: 4), H5 (SEQ ID NO: 5), or H6 (SEQ ID NO: 6). The subject can be diagnosed as having an increased risk for a thrombotic event.

[0028] Disclosed is a method of screening to determine the presence of alloantibodies of FVIII comprising, administering FVIII of a known haplotype wherein the haplotype is H1 (SEQ ID NO: 1), H2 (SEQ ID NO: 2), H3 (SEQ ID NO: 3), H4 (SEQ ID NO: 4), H5 (SEQ ID NO: 5), H6 (SEQ ID NO: 6), and determining whether alloantibody binding occurs.

[0029] Disclosed is a method of in vitro screening to determine the presence of alloantibodies or autoantibodies of FVIII comprising, testing FVIII of a known haplotype wherein the haplotype is H1 (SEQ ID NO: 1), H2 (SEQ ID NO: 2), H3 (SEQ ID NO: 3), H4 (SEQ ID NO: 4), H5 (SEQ ID NO: 5), H6 (SEQ ID NO: 6), in a Bethesda Assay for determining the Bethesda Units as a measure of reactivity with alloantibodies.

[0030] Disclosed is an oligonucleotide comprising the sequence as set forth in SEQ ID NO: 1. Disclosed is an oligonucleotide comprising the sequence as set forth in SEQ ID NO: 2. Disclosed is an oligonucleotide comprising the sequence as set forth in SEQ ID NO: 3. Disclosed is an oligonucleotide comprising the sequence as set forth in SEQ ID NO: 4. Disclosed is an oligonucleotide comprising the sequence as set forth in SEQ ID NO: 5. Disclosed is an oligonucleotide comprising the sequence as set forth in SEQ ID NO: 6.

[0031] Disclosed is an oligonucleotide comprising a sequence selected from the group consisting of SEQ ID NO:1-12 and 25-124.

[0032] Disclosed is a mixture of primers comprising SEQ ID NOS: 25 and 26. Disclosed is a mixture of primers comprising SEQ ID NOS: 29 and 30. Disclosed is a mixture of primers comprising SEQ ID NOS: 33 and 34. Disclosed is a mixture of primers comprising SEQ ID NOS: 37 and 38. Disclosed is a mixture of primers comprising SEQ ID NOS: 25 and 26. Disclosed is a mixture of primers comprising SEQ ID NOS: 41 and 42. Disclosed is a mixture of primers comprising SEQ ID NOS: 43 and 44. Disclosed is a mixture of primers comprising SEQ ID NOS: 45 and 46. Disclosed is a mixture of primers comprising SEQ ID NOS: 47 and 48. Disclosed is a mixture of primers comprising SEQ ID NOS: 49-124.

[0033] Disclosed is a polypeptide comprising the sequence as set forth in SEQ ID NO: Disclosed is a polypeptide comprising the sequence as set forth in SEQ ID NO: 14. Disclosed is a polypeptide comprising the sequence as set forth in SEQ ID NO: 15. Disclosed is a polypeptide comprising the sequence as set forth in SEQ ID NO: 16. Disclosed is a polypeptide comprising the sequence as set forth in SEQ ID NO: 17. Disclosed is a polypeptide comprising the sequence as set forth in SEQ ID NO: 18. Disclosed is a polypeptide comprising the sequence as set forth in SEQ ID NO: 19. Disclosed is a polypeptide comprising the sequence as set forth in SEQ ID NO: 20. Disclosed is a polypeptide comprising the sequence as set forth in SEQ ID NO: 21. Disclosed is a polypeptide comprising the sequence as set forth in SEQ ID NO: 22. Disclosed is a polypeptide comprising the sequence as set forth in SEQ ID NO: 23. Disclosed is a polypeptide comprising the sequence as set forth in SEQ ID NO: 24.

[0034] Disclosed is a composition comprising pooled FVIII having a single haplotype. The haplotype can be H1, H2, H3, H4, H5 or H6.

[0035] Disclosed is a recombinant FVIII having the H1 haplotype. Disclosed is a recombinant FVIII having the H2 haplotype. Disclosed is a recombinant FVIII having the H3 haplotype. Disclosed is a recombinant FVIII having the H4 haplotype. Disclosed is a recombinant FVIII having the H5 haplotype. Disclosed is a recombinant FVIII having the H6 haplotype.

### III. BRIEF DESCRIPTION OF THE DRAWINGS

[0036] The accompanying drawings, which are incorporated in and constitute a part of this specification, illustrate several embodiments and together with the description illustrate the disclosed compositions and methods.

[0037] FIG. 1 is an amplicon model for resequencing an FVIII gene to identify haplotype.

[0038] FIG. 2 is a schematic representation of non-synonymous single nucleotide polymorphisms (SNP's) of the human coagulation FVIII protein.

[0039] FIG. 3 is a schematic representation of seven wildtype FVIII proteins and the percentage of racial populations that express such haplotypes.

[0040] FIG. 4 is a schematic representation of three commercially available forms of wildtype FVIII.

[0041] FIG. 5 illustrates plasmids that can express five forms of FVIII.

[0042] FIG. 6 is a schematic representation of common non-hemophilic F8 nsSNPs indicative of thrombosis susceptibility.

[0043] FIG. 7 presents the FVIII:C levels versus age indicating the sex of each subject.

[0044] FIGS. 8 A, B, and C present the estimated r² and D′ between each pair of alleles, respectively.

[0045] FIG. 9 illustrates the pattern and degree of LD across F8 in various human populations.

### IV. DETAILED DESCRIPTION

[0046] Before the present compounds, compositions, articles, devices, and/or methods are disclosed and described, it is to be understood that they are not limited to specific synthetic methods or specific recombinant biotechnology methods unless otherwise specified, or to particular reagents unless otherwise specified, as such may, of course, vary. It is also to be understood that the terminology used herein is for the purpose of describing particular embodiments only and is not intended to be limiting.

### A. DEFINITIONS

[0047] As used in the specification and the appended claims, the singular forms “a,” “an” and “the” include plural referents unless the context clearly dictates otherwise. Thus, for example, reference to “a pharmaceutical carrier” includes mixtures of two or more such carriers, and the like.

[0048] Ranges can be expressed herein as from “about” one particular value, and/or to “about” another particular value. When such a range is expressed, another embodiment includes from the one particular value and/or to the other particular value. Similarly, when values are expressed as approximations, by use of the antecedent “about,” it will be understood that the particular value forms another embodiment. It will be further understood that the endpoints of each of the ranges are significant both in relation to the other endpoint, and independently of the other endpoint. It is also understood that there are a number of values disclosed herein, and that each value is also herein disclosed as “about” that particular value in addition to the value itself. For example, if the value “10” is disclosed, then “about 10” is also disclosed. It is also understood that when a value is disclosed that “less than or equal to” the value, “greater than or equal to the value” and possible ranges between values are also disclosed, as appropriately understood by the skilled artisan. For example, if the value “10” is disclosed the “less than or equal to 10” as well as “greater than or equal to 10” is also disclosed. It is also understood that the throughout the application, data is provided in a number of different formats, and that this data, represents endpoints and starting points, and ranges for any combination of the data points. For example, if a particular data point “10” and a particular data point 15 are disclosed, it is understood that greater than, greater than or equal to, less than, less than or equal to, and equal to 10 and 15 are considered disclosed as well as between 10 and 15. It is also understood that each unit between two particular units are also disclosed. For example, if 10 and 15 are disclosed, then 11, 12, 13, and 14 are also disclosed.

[0049] In this specification and in the claims which follow, reference will be made to a number of terms which shall be defined to have the following meanings:

[0050] “Optional” or “optionally” means that the subsequently described event or circumstance may or may not occur, and that the description includes instances where said event or circumstance occurs and instances where it does not.

[0051] “Probes” are molecules capable of interacting with a target nucleic acid, typically in a sequence specific manner, for example through hybridization. The hybridization of nucleic acids is well understood in the art and discussed herein. Typically a probe can be made from any combination of nucleotides or nucleotide derivatives or analogs available in the art.

[0052] “Primers” are a subset of probes which are capable of supporting some type of enzymatic manipulation and which can hybridize with a target nucleic acid such that the enzymatic manipulation can occur. A primer can be made from any combination of nucleotides or nucleotide derivatives or analogs available in the art which do not interfere with the enzymatic manipulation.

[0053] The terms “higher,” “increases,” “elevates,” or “elevation” refer to increases above basal levels, e.g., as compared to a control. The terms “low,” “lower,” “reduces,” or “reduction” refer to decreases below basal levels, e.g., as compared to a control. For example, basal levels are normal in vivo levels prior to, or in the absence of, treatment as disclosed herein.

[0054] As used throughout, by a “subject” is meant an individual. Thus, the “subject” can include domesticated animals, such as cats, dogs, etc., livestock (e.g., cattle, horses, pigs, sheep, goats, etc.), laboratory animals (e.g., mouse, rabbit, rat, guinea pig, etc.) and birds. Preferably, the subject is a mammal such as a primate, and, more preferably, a human.

[0055] Throughout this application, various publications are referenced. The disclosures of these publications in their entireties are hereby incorporated by reference into this application in order to more fully describe the state of the art to which this pertains. The references disclosed are also individually and specifically incorporated by reference herein for the material contained in them that is discussed in the sentence in which the reference is relied upon.

### B. GENERAL

[0056] The present invention may be understood more readily by reference to the following detailed description of preferred embodiments of the invention and the Examples included therein and to the Figures and their previous and following description.

[0057] Blood clotting begins when platelets adhere to the cut wall of an injured blood vessel at a lesion site. Subsequently, in a cascade of enzymatically regulated reactions, soluble fibrinogen molecules are converted by the enzyme thrombin to insoluble strands of fibrin that hold the platelets together in a thrombus. At each step in the cascade, a protein precursor is converted to a protease that cleaves the next protein precursor in the series. Cofactors are required at most of the steps. Factor VIII circulates as an inactive precursor in blood, bound tightly and non-covalently to von Willebrand factor. Factor VIII is proteolytically activated by thrombin or factor Xa, which dissociates it from von Willebrand factor and activates its procoagulant function in the cascade. In its active form, the protein factor VIIIa is a cofactor that increases the catalytic efficiency of factor IXa toward factor X activation by several orders of magnitude.

[0058] People with deficiencies in factor VIII or antibodies against factor VIII who are not treated with factor VIII suffer uncontrolled internal bleeding that may cause a range of serious symptoms, from inflammatory reactions in joints to early death. Severe hemophiliacs, who number about 10,000 in the United States, can be treated with infusion of human factor VIII, which will restore the blood's normal clotting ability if administered with sufficient frequency and concentration. The classical definition of factor VIII is that substance present in normal blood plasma that corrects the clotting defect in plasma derived from individuals with hemophilia A.

[0059] The development of factor VIII (FVIII) inhibitors has been, next to HIV and hepatitis, the most serious complication of hemophilia therapy. Although the recent production of highly purified and genetically engineered FVIII products has decreased the risk of these infections, the development of inhibitors remains a major therapeutic challenge. Because affected patients, usually children, are rendered resistant to conventional replacement therapy, control of hemostasis becomes difficult, resulting in substantial morbidity.

[0060] Inhibitors (alloantibodies) are IgG antibodies, mostly of the IgG4 subclass, that react with FVIII and interfere with its pro-coagulant function. Clinically, patients with inhibitors are classified into high and low responders according to the strength of the anamnestic response they experience when they are re-exposed to FVIII. The goals of therapy in these patients are to control severe acute bleeding and to eradicate the inhibitor.

[0061] Two so called by passing agents are used to control bleeding in hemophilia A patients refractory to fVIII. FEIBA, an acronym for “factor eight inhibitor bypassing activity” is derived from large pools of human plasma and is comprised of activated coagulation factors—prothrombin, factors VIII, IX and X. Considerable care and experience is required to use FEIBA safely. It has been associated with thromboembolic events in patients, notably disseminated intravascular coagulation with mortality and at least 14 reported cases of myocardial infarcts. NovoSeven is a recombinant form of activated coagulation factor VIII (rfVIII). The product is safe and for most but not all hemophilia A patients effective in controlling bleeds. A drawback of using any bypassing agent, including NovoSeven, is the absence of reliable quantitative assays to monitor activity level. In contrast, FVIII levels and activity may be readily determined and treatment adjusted accordingly. Perhaps the major disadvantage of NovoSeven is its costs. It has a very short half life which necessitates multiple intravenous infusions. Use of NovoSeven to cover surgery may cost hundreds of thousands of dollars per procedure. A third product designed to treat inhibitor patients, recombinant porcine fVIII, is in phase 2 clinical trials (www.octagen.com) and not yet commercially available. Attempts have been made to ascertain the costs of treating high titer inhibitor patients, especially in comparison to those having no, or low titer. In one study of treatment costs for 104 hemophilia patients at Centre Hospitalier Regional Iniversitaire, Lille, France, it was determined that over the period 1988-1995 average annual costs for treatment were $41,000 for patients having no inhibitors, $46,000 for those having low responding inhibitors and $59,000 for those with high responding inhibitors (Goudemand, J 1998).

[0062] Another strategy for coping with inhibitors is to attempt to induce immune tolerance (ITI) to FVIII. ITI involves frequent exposure to FVIII over extended periods of time and is not always successful. In one protocol high purity factor was given at a dose of 100 IU FVIII/kg body weight per day for 8-18 months Rocino et, al 1999). The Bonn protocol requires high doses of FVIII twice daily (Kreuz et. al., 2003). The large amounts of factor needed for successful ITI render it cost prohibitive in many circumstances

[0063] The pathogenesis of inhibitor development is complex and poorly understood. The nature of the hemophilic mutation is one risk factor for inhibitor development. Patients with large gene deletions, nonsense mutations and intrachromosomal aberrations have a higher incidence of inhibitors than those with missense mutations, small deletions/insertions and splice site mutations. This risk variability is thought to reflect the degree of tolerance that the patient has for the infused replacement product. A weak correlation has also been shown between risk of inhibitor development and major histocompatibility complex (MHC) class I/II genotypes. However, none of these relationships is inviolate in that some patients with high risk mutations and unfavorable genotypes do not develop inhibitors, while others with missense mutations do.

[0064] Ethnicity is also a well established risk determinant for inhibitors. The incidence of inhibitors among African-American (AA) hemophilia patients is twice that observed in Caucasians. No clear explanation of the basis for this elevated risk has emerged. Recently, we sequenced the F8 from 137 healthy people representing seven ethnic groups and identified four common nonsynonymous single nucleotide polymorphisms (nsSNPs). We further found that naturally-occurring haplotypes of these nsSNPs encode six structurally-distinct wildtype FVIII proteins. Five of these haplotypes, designated H1, H2, H3, H4 & H5, are expressed by African-Americans, whereas only two, H1 & H2, are expressed by Caucasians. Two haplotypes, H3 & H5, which together are expressed in ˜23% of African-Americans, have the minor allele of M2238V in the C2 dominant epitope.

[0065] Loss-of-function mutations in the gene encoding factor FVIII represent the inherited basis for hemophilia (H)A. Currently, HA is treated primarily through exogenous factor replacement therapy using either recombinant (r)- or plasma-derived (pd)-FVIII.

[0066] There are currently three commercially available concentrated r-FVIII preparations that are in current use for treating HA patients (FIG. 4). As shown in FIG. 4, the H1 and H2 haplotypes are represented by commercially available FVIII. While FVIII has previously been thought to be a monomorphic protein in the non-hemophilic population, the present invention provides at least four common non-synonymous-single-nucleotide-polymorphisms (nsSNPs), combinations of which represent six naturally-occurring allelic variants of the FVIII protein in the human population (FIG. 2). In FIG. 2, the five SNP's (W255C, R484H, R776G, D1241E, and M2238V) are illustrated. Combinations of these four SNP's correspond to six haplotypes. This has been determined by direct DNA sequencing of PCR amplified fragments of the FVIII genes from numerous unrelated individuals of multiple ethnicities; FIG. 1 shows a description of an nsSNP genotyping assay which is based on DNA sequencing. PCR can generate 35 amplicons which are subsequently subjected to automated DNA sequencing. By examining male members of different ethnic groups (e.g. because they only have one X-Chromosome) and females who are homozygous for all nsSNPs or are only singly heterozygous, the naturally-occurring haplotypes (H) of these variations have been defined (e.g. the combinations by which the alleles of these five nsSNPs segregate naturally). As such, six different haplotypic forms of the wt FVIII protein have been identified. These haplotypic forms have been designated: H1 (SEQ ID NO: 1), H2 (SEQ ID NO: 2), H3 (SEQ ID NO: 3), H4 (SEQ ID NO: 4), H5 (SEQ ID NO: 5), and H6 (SEQ ID NO: 6) (FIG. 3). Each of these variants represents a normal allelic variant of the FVIII protein since the individuals from whom the sequences were described have no bleeding disorders.

[0067] Based upon these allelic or haplotypic variants, a specific genetic test has been designed to establish the fVIII genotype of any individual (FIG. 1 shows a description of a SNP assay). In addition, the plasmid-based FVIII expression vectors for expressing the different haplotypes (e.g. each of these variants) have been developed using recombinant technology (FIG. 5). Thus, novel alleles can be identified, cloned into expression vectors, and a screening test developed to determine the genotype of a given individual. This allows for the determination of any subject's allelic type and correct allelic matching of the replacement FVIII product.

[0068] One of the main problems that arise during FVIII replacement therapy is that the hemophilic recipient often mounts an alloimmune response against the recombinant FVIII protein that is infused. This occurs because wild type FVIII represents a foreign protein and is thus not recognized as self by the immune system. In the past, it has been assumed that this immune response is directed against the wild type sequence(s) that is or are absent in the hemophilic patient due to the pathogenic mutation. However, any subject who has a hemophilic mutation on the background of a different naturally occurring allele than the recombinant factor can also mount an immune response against the naturally occurring variation(s).

[0069] An advantage of the present invention is that matching the replacement product to the background allele of the recipient can minimize the immunological barriers involved in FVIII replacement. In this way, the only difference is the pathogenic mutation itself. Consequently, the efficacy of FVIII replacement therapy can be maximized and the likelihood of developing potentially fatal antibody-based inhibitors can be significantly reduced. This is a clear advantage to the current technology, which is limited by the fact that only two allelic variant of recombinant FVIII is available. Similarly, plasma derived products are expected to be highly enriched with haplotypes most common in the plasma or blood donor population from which the replacement factor is processed. In the US plasma derived preparations of fVIII would be expected to be somewhat heterogenous with respect to fVIII haplotype content but highly enriched for H1. Thus, the present invention allows expression of different recombinant FVIII alleles or the use of the existing recombinant or plasma derived allelic variants to treat matched subjects. By matching these alleles to the background allele of the hemophilic subject, the problem of the generation of antibodies that inhibit successful treatment of hemophilia with recombinant FVIII may be reduced or eliminated.

[0070] The relevancy of this approach is not limited to replacement transfusion therapy of hemophilia A patients with congenital deficiencies of FVIII. There are other known hereditary bleeding disorders resulting from congenital deficiencies or functional defects in von Willebrand's factor and coagulation factors IX (FIX) and XI (FXI). Since antibody inhibitors against these proteins are known complications of factor replacement therapy, the disclosed invention is generally applicable to maximizing transfusion efficacy in the treatment of these other hemostatic disorders.

[0071] In addition to the problems inherent to congenital hemostatic disorders, this general approach has broad relevancy to treatment of acquired bleeding diathesis. Transfusion of fresh frozen plasma (FFP) is often used in the treatment of bleeding patients with multiple coagulation derangements, such as individuals in liver failure who have decreased synthesis of all coagulation factors except FVIII. Since there are likely to be naturally occurring allelic variants of these other coagulation factors, analogous to the alleles off FVIII and FIX, such subjects can respond by producing inhibitory antibodies reactive against each allelic variant not encoded by their own genome. Thus, in the multiply transfused subject, the efficacy of plasma products can significantly decline as immunity arises. In contrast to the situation for cellular transfusion therapy, there is no current methodology for matching plasma donor products to the genotype or haplotype of a recipient. The assay systems disclosed herein, however, allow genotyping of plasma donors and recipients. By matching plasma products to the subjects receiving them, as is already done with blood cells, the production of antibody-based coagulation inhibitors is avoided. This can drastically improve efficacy in the treatment of acquired bleeding disorders.

[0072] Since gene replacement is another approach for factor replacement in hemophilia A and other heritable bleeding diatheses, matching the expressed coagulation factor with the recipient allele is of utmost importance at the DNA level for designing various recombinant expression vectors. The series of different FVIII constructs disclosed, which represent all naturally occurring haplotypic alleles, allow each hemophiliac undergoing gene therapy to receive allelically matched replacement FVIII protein. Therefore, this approach can reduce or prevent the induction of immune responses to the protein whether the exposure occurs by replacement therapy or gone therapy. This is important because such a response in the gene therapy setting can result in both neutralizing antibodies against the protein and lytic responses against host tissues that are successfully transduced with the gene therapy vector. Preventing such a response is an essential requirement for the success of any gene therapy approach regardless of which molecular or cellular vehicle is ultimately found to be the optimal vector for transgene delivery.

[0073] Autoantibodies occurring in subjects with acquired hemophilia A differ in many aspects from alloantibodies developing in subjects with congenital hemophilia A after replacement therapy. Like the alloantibodies occurring in severe hemophilia A, factor VIII inhibitors have been characterized as being predominantly polyclonal, belonging to an IgG4 subclass. However, in contrast to the situation in congenital hemophilia, monoclonal IgA or IgM antibodies have also been described in subjects with acquired hemophilia A associated with hematologic malignancies. Another difference between FVIII autoantibodies and alloantibodies lies in their method of inhibition. The differences are, however, subtle, as autoantibody inhibitors are mainly directed against single epitopes on the factor VIII molecule (A2 domain, A3 domain, and, more frequently, C2 domain), whereas alloantibodies are usually directed against both the A2 and C2 domains and sometimes against the A3 domain.

[0074] Epitopes that are immunoreactive with antibodies that inhibit the coagulant activity of factor VIII have been characterized based on known structure-function relationships in factor VIII. Inhibitors can, for example, act by disrupting any of the macromolecular interactions associated with the domain structure of factor VIII or its associations with von Willebrand factor, thrombin, factor Xa, factor IXa, or factor X. However, most inhibitory antibodies to human factor VIII act by binding to epitopes located in the 40 kDa A2 domain or 20 kDa C2 domain of factor VIII, disrupting specific functions associated with these domains, as described by Fulcher et al. (1985) Proc. Natl. Acad. Sci. USA 82:7728-7732; and Scandella et al. (1988) Proc. Natl. Acad. Sci. USA 85:6152-6156 (herein incorporated by reference in their entirety). In addition to the A2 and C2 epitopes, there may be a third epitope in the A3 or C1 domain of the light chain of factor VIII, according to Scandella et al. (1993) Blood 82:1767-1775. The significance of this putative third epitope is unknown, but it appears to account for a minor fraction of the epitope reactivity in factor VIII.

[0075] Anti-A2 antibodies block factor X activation, as shown by Lollar et al. (1994) J. Clin. Invest. 93:2497-2504 (incorporated by reference in their entirety). Previous mapping studies by deletion mutagenesis described by Ware et al. (1992) Blood Coagul. Fibrinolysis 3:703-716, incorporated by reference in their entirety, located the A2 epitope to within a 20 kDa region of the NH.sub.2-terminal end of the 40 kDa A2 domain. Competition immunoradiometric assays have indicated that A2 inhibitors recognize either a common epitope or narrowly clustered epitopes, as described by Scandella et al. (1992) Throm. Haemostas. 67:665-671, and as demonstrated in U.S. Pat. No. 5,859,204 (both herein incorporated by reference in their entirety).

[0076] In this application the term low, reduced, or nonantigenic FVIII is used to describe a FVIII construct that does not demonstrate reduced coagulant activity in vitro when exposed to potentially antibodies or in vivo when administrated to a patient that has deficient FVIII coagulant activity. The patient may have congenital or acquired hemophilia A.

[0077] In this application the term low, reduced or nonimmunogenic FVIII is used to describe a FVIII construct that when administered to previously untreated congenital hemophilia A patients does not stimulate the formation of antibodies that react with such fVIII construct or stimulates the formation of antibodies that react with such factor in a less effective manner or in a manner that does not reduce the clinical efficacy of the administered factor to the same degree as other replacement fVIII do.

[0078] Testing of Recombinant Factor VIII Molecules: Factor VIII replacement molecules that are haplotypically matched to the patient haplotype (haplotypically matched fVIII) can be tested in humans for their reduced antigenicity and/or immunogenicity in at least two types of clinical trials. In one type of trial, designed to determine whether haplotypically matched factor VIII is immunoreactive with inhibitory antibodies haplotypically matched factor VIII s administered, preferably by intravenous infusion, to approximately 25 patients having factor VIII deficiency who have antibodies to factor VIII that inhibit the coagulant activity of therapeutic human FVIII that is not haplotypically matched. The dosage of haplotypically matched fVIII is in a range between 5 and 50 Units/kg body weight, preferably 10-50 Units/kg, and most preferably 40 Units/kg body weight. Approximately 1 hour after each administration, the recovery of factor VIII from blood samples is measured in a one-stage coagulation assay. Samples are taken again approximately 5 hours after infusion, and recovery is measured. Total recovery and the rate of disappearance of factor VIII from the samples is predictive of the antibody titer and inhibitory activity. If the antibody titer is high, factor VIII recovery usually cannot be measured. The recovery results of the haplotypically matched fVIII are compared to the recovery of recovery results for factor VIII, that is not haplotypically matched porcine factor VIII, and other commonly used therapeutic forms of factor VIII or factor VIII substitutes.

[0079] In a second type of clinical trial, designed to determine whether the haplotypically matched fVIII is immunogenic, i.e., whether patients will develop inhibitory antibodies that react with the haplotypically matched fVIII, haplotypically matched fVIII, is administered, as described in the preceding paragraph, to approximately 100 previously untreated hemophiliac patients who have not developed antibodies to factor VIII. Treatments are given approximately every 2 weeks over a period of 6 months to 1 year. At 1 to 3 month intervals during this period, blood samples are drawn and Bethesda assays or other antibody assays are performed to determine the presence of inhibitory antibodies. Recovery assays can also be done, as described above, after each infusion. Results are compared to hemophiliac patients who receive human factor VIII that is not haplotypically matched or to porcine factor VIII, or other commonly used therapeutic forms of factor VIII or factor VIII substitutes.

[0080] Anti-FVIII antibodies (Ab) include three subtypes analogous to RBC antigens (Ag) and Ab. The three subtypes include:
[0081] Isoantibodies→the subtype of anti-FVIII Ab that occurs in hemophilia A patients who have no immunologically detectable circulating FVIII protein. This type of FVIII-deficiency is referred to as cross-reactive-material-negative (CRM−), and is due to the presence of a F8 mutation subtype known as a null-mutation, which include the following: large deletions, nonsense mutations and intragenic inversions, such as the recurrent intron 22 inversion, or, less frequently, the intron 1 inversion.
[0082] Alloantibodies→the subtype of anti-FVIII Ab that occurs in hemophilia A patients who have an immunologically detectable circulating FVIII protein that is dysfunctional. This type of FVIII-deficiency is referred to as either CRM-positive (CRM+) or CRM-reduced (CRM-r), and is typically found in patients who have a hemophilic missense F8 mutation. Hemophilia A patients with certain small deletions and/or splice-site mutations can also have CRM+ or CRM-r FVIII-deficiencies.
[0083] Autoantibodies→the subtype of anti-FVIII Ab that occurs in non-hemophilic individuals with wildtype FVIII who develop acquired hemophilia A.
   These anti-FVIII antibodies bind and inhibit the function of FVIII (i.e. the catalytically inactive form of the molecule referred to as the pro-cofactor form) and/or FVIIIa (i.e. the catalytically active form of the molecule referred to as the cofactor form), both in vivo and in clotting assays in vitro. The antibodies are usually IgG (primarily IgG4) and bind limited regions of FVIII. A subset of the anti-FVIII Ab that develop can increase peripheral clearance and/or degradation of FVIII.

[0084] While several effective pharmacologic agents are already available to clinicians for use in both treating and prophylaxing against thrombosis, physicians are not able to accurately identify those individuals at greatest risk for these disorders. Since strokes and heart attacks are just two facets of thrombosis, many more people will suffer from this disorder than are affected by hemophilia A, or from all congenital bleeding disorders combined. Disclosed are diagnostic algorithms, which accurately identify at risk individuals and allow prophylactic risk reduction regimens to be implemented prior to their manifesting a stroke or heart attack, or other types cardiovascular thrombosis. The alleles of the four ns-SNPs, which underlie the 6 naturally-occurring forms of the FVIII protein in humans, are functionally distinct and may influence the circulating level of FVIII. With respect to the D1241E ns-SNP, for example, those with the E-allele at the protein level (or G-allele at the nucleotide level), have about a 25% lower mean circulating FVIII level. Since elevated circulating levels of this coagulation protein a frequently observed phenotype in the non-hemophilic population, have been associated with elevated risk for both arterial and venous thrombosis, the E-allele of D1241E may be protective against thrombosis. Therefore, the methods disclosed for differentiating between the alleles of, for example, the D1241E ns-SNP, or, within the set of six naturally-occurring haplotypes of the FVIII protein, the subset that contains the E-allele of this ns-SNP (i.e. H2, H3, H4, and H6) and the subset that contains the D-allele (i.e. H1 and H5) improve current diagnostic algorithms for assessing thrombosis risk. This type of testing, in contrast to the rapid testing described herein for the hemophilia, is largely for diagnostic risk assessment, in order to guide prophylactic treatment decisions, as such does not necessarily have to be performed in a rapid manner.

[0085] The present invention is described with regards to Hemophilia as well as other hemostatic disorders including: afibrinogenemia, dysfibrinogenemia, nonplatelet hemostasis, coagulation, thrombosis, thrombophilia, FV deficiency, Owren disease, parahemophilia, FVII deficiency, FVIII deficiency, FX deficiency, FXI deficiency, FXII deficiency, FXIII deficiency, factor V Leiden deficiency, DIC, protein C deficiency, activated protein C resistance, protein S deficiency, antithrombin III deficiency, hypoprothrombinemias, cryoglobulinemias, multiple myeloma, Waldenstrom macroglobulinemia, Henoch-Schonlein purpura, hyperglobulinemic purpura, cavernous hemangioma, hereditary hemorrhagic telangiectasia, pseudoxanthoma elasticum, Ehlers-Danlos syndrome, Cushing syndrome, Shwartzman phenomenon, von Willebrand disease, Waterhouse-Friderichsen syndrome, and Wiskott-Aldrich syndrome.

[0086] Thus, disclosed herein are methods and compositions relating to the various haplotypes of FVIII, and how they can be used advantageously to treat subjects with diseases and disorders relating to FVIII.

### C. COMPOSITIONS

[0087] Disclosed are the components to be used to prepare the disclosed compositions as well as the compositions themselves to be used within the methods disclosed herein. For example, disclosed herein are various haplotypes of FVIII, each with a different sequence identity. These haplotypes and variations and combinations of these haplotypes are contemplated. It should be noted that the specific haplotypes disclosed herein need not be varied, and their specific sequences are important with many of the methods disclosed herein. However, where variations can occur, and where such variations are useful, the following principles regarding homology and sequence variation apply. Therefore, it is understood that when combinations, subsets, interactions, groups, etc. of these materials are disclosed that while specific reference of each various individual and collective combinations and permutation of these compounds may not be explicitly disclosed, each is specifically contemplated and described herein, wherein such may apply. For example, if a particular haplotype is disclosed and discussed and a number of modifications that can be made to a number of molecules including the point of interest of the haplotype are discussed, specifically contemplated is each and every combination and permutation of the haplotype and the modifications that are possible unless specifically indicated to the contrary. Thus, if a class of molecules A, B, and C are disclosed as well as a class of molecules D, E, and F and an example of a combination molecule, A-D is disclosed, then even if each is not individually recited each is individually and collectively contemplated meaning combinations, A-E, A-F, B-D, B-E, B-F, C-D, C-E, and C-F are considered disclosed. Likewise, any subset or combination of these is also disclosed. Thus, for example, the sub-group of A-E, B-F, and C-E would be considered disclosed. This concept applies to all aspects of this application including, but not limited to, steps in methods of making and using the disclosed compositions. Thus, if there are a variety of additional steps that can be performed it is understood that each of these additional steps can be performed with any specific embodiment or combination of embodiments of the disclosed methods.

[0088] Sequence Similarities

[0089] It is understood that as discussed herein the use of the terms homology and identity mean the same thing as similarity. Thus, for example, if the use of the word homology is used between two non-natural sequences it is understood that this is not necessarily indicating an evolutionary relationship between these two sequences, but rather is looking at the similarity or relatedness between their nucleic acid sequences. Many of the methods for determining homology between two evolutionarily related molecules are routinely applied to any two or more nucleic acids or proteins for the purpose of measuring sequence similarity regardless of whether they are evolutionarily related or not.

[0090] In general, it is understood that one way to define any known variants and derivatives or those that might arise, of the disclosed genes and proteins herein, is through defining the variants and derivatives in terms of homology to specific known sequences. This identity of particular sequences disclosed herein is also discussed elsewhere herein. In general, variants of genes and proteins herein disclosed typically can have at least, about 70, 71, 72, 73, 74, 75, 76, 77, 78, 79, 80, 81, 82, 83, 84, 85, 86, 87, 88, 89, 90, 91, 92, 93, 94, 95, 96, 97, 98, or 99 percent homology to the stated sequence or the native sequence. This principle can apply to primers, probes, and other nucleic acids and proteins as described herein. However, in certain instances as disclosed herein, genetic variants have defined sequence differences which may not have a given percentage of change, but may instead have 1, 2, 3, 4, 5, 6, 7, 8, 9, 10, or more differences in nucleic acid or amino acid sequence when compared to a native, known, or control sequence. Those of skill in the art readily understand how to determine the homology of two proteins or nucleic acids, such as genes. For example, the homology can be calculated after aligning the two sequences so that the homology is at its highest level.

[0091] Another way of calculating homology can be performed by published algorithms. Optimal alignment of sequences for comparison may be conducted by the local homology algorithm of Smith and Waterman Adv. Appl. Math. 2: 482 (1981), by the homology alignment algorithm of Needleman and Wunsch, J. MoL Biol. 48: 443 (1970), by the search for similarity method of Pearson and Lipman, Proc. Natl. Acad. Sci. U.S.A. 85: 2444 (1988), by computerized implementations of these algorithms (GAP, BESTFIT, FASTA, and TFASTA in the Wisconsin Genetics Software Package, Genetics Computer Group, 575 Science Dr., Madison, Wis.), or by inspection.

[0092] The same types of homology can be obtained for nucleic acids by for example the algorithms disclosed in Zuker, M. Science 244:48-52, 1989, Jaeger et al. Proc. Natl. Acad. Sci. USA 86:7706-7710, 1989, Jaeger et al. Methods Enzymol. 183:281-306, 1989 which are herein incorporated by reference for at least material related to nucleic acid alignment. It is understood that any of the methods typically can be used and that in certain instances the results of these various methods may differ, but the skilled artisan understands if identity is found with at least one of these methods, the sequences would be said to have the stated identity, and be disclosed herein.

[0093] For example, as used herein, a sequence recited as having a particular percent homology to another sequence refers to sequences that have the recited homology as calculated by any one or more of the calculation methods described above. For example, a first sequence has 80 percent homology, as defined herein, to a second sequence if the first sequence is calculated to have 80 percent homology to the second sequence using the Zuker calculation method even if the first sequence does not have 80 percent homology to the second sequence as calculated by any of the other calculation methods. As another example, a first sequence has 80 percent homology, as defined herein, to a second sequence if the first sequence is calculated to have 80 percent homology to the second sequence using both the Zuker calculation method and the Pearson and Lipman calculation method even if the first sequence does not have 80 percent homology to the second sequence as calculated by the Smith and Waterman calculation method, the Needleman and Wunsch calculation method, the Jaeger calculation methods, or any of the other calculation methods. As yet another example, a first sequence has 80 percent homology, as defined herein, to a second sequence if the first sequence is calculated to have 80 percent homology to the second sequence using each of calculation methods (although, in practice, the different calculation methods will often result in different calculated homology percentages).

[0094] 2. Hybridization/Selective Hybridization

[0095] The term hybridization typically means a sequence driven interaction between at least two nucleic acid molecules, such as a primer or a probe and a gene. Sequence driven interaction means an interaction that occurs between two nucleotides or nucleotide analogs or nucleotide derivatives in a nucleotide specific manner. For example, G interacting with C or A interacting with T are sequence driven interactions. Typically sequence driven interactions occur on the Watson-Crick face or Hoogsteen face of the nucleotide. The hybridization of two nucleic acids is affected by a number of conditions and parameters known to those of skill in the art. For example, the salt concentrations, pH, and temperature of the reaction all affect whether two nucleic acid molecules will hybridize.

[0096] Parameters for selective hybridization between two nucleic acid molecules are well known to those of skill in the art. For example, in some embodiments selective hybridization conditions can be defined as stringent hybridization conditions. For example, stringency of hybridization is controlled by both temperature and salt concentration of either or both of the hybridization and washing steps. For example, the conditions of hybridization to achieve selective hybridization may involve hybridization in high ionic strength solution (6×SSC or 6×SSPE) at a temperature that is about 12-25° C. below the Tm (the melting temperature at which half of the molecules dissociate from their hybridization partners) followed by washing at a combination of temperature and salt concentration chosen so that the washing temperature is about 5° C. to 20° C. below the Tm. The temperature and salt conditions are readily determined empirically in preliminary experiments in which samples of reference DNA immobilized on filters are hybridized to a labeled nucleic acid of interest and then washed under conditions of different stringencies. Hybridization temperatures are typically higher for DNA-RNA and RNA-RNA hybridizations. The conditions can be used as described above to achieve stringency, or as is known in the art. (Sambrook et al., Molecular Cloning: A Laboratory Manual, 2nd Ed., Cold Spring Harbor Laboratory, Cold Spring Harbor, N.Y., 1989; Kunkel et al. Methods Enzymol. 1987:154:367, 1987 which is herein incorporated by reference for material at least related to hybridization of nucleic acids). A preferable stringent hybridization condition for a DNA:DNA hybridization can be at about 68° C. (in aqueous solution) in 6×SSC or 6×SSPE followed by washing at 68° C. Stringency of hybridization and washing, if desired, can be reduced accordingly as the degree of complementarity desired is decreased, and further, depending upon the G-C or A-T richness of any area wherein variability is searched for. Likewise, stringency of hybridization and washing, if desired, can be increased accordingly as homology desired is increased, and further, depending upon the G-C or A-T richness of any area wherein high homology is desired, all as known in the art.

[0097] Another way to define selective hybridization is by looking at the amount (percentage) of one of the nucleic acids bound to the other nucleic acid. For example, in some embodiments selective hybridization conditions would be when at least about, 60, 65, 70, 71, 72, 73, 74, 75, 76, 77, 78, 79, 80, 81, 82, 83, 84, 85, 86, 87, 88, 89, 90, 91, 92, 93, 94, 95, 96, 97, 98, 99, 100 percent of the limiting nucleic acid is bound to the non-limiting nucleic acid. Typically, the non-limiting primer is in for example, 10 or 100 or 1000 fold excess. This type of assay can be performed at under conditions where both the limiting and non-limiting primer are for example, 10 fold or 100 fold or 1000 fold below their k_{d}, or where only one of the nucleic acid molecules is 10 fold or 100 fold or 1000 fold or where one or both nucleic acid molecules are above their k_{d}.

[0098] Another way to define selective hybridization is by looking at the percentage of primer that gets enzymatically manipulated under conditions where hybridization is required to promote the desired enzymatic manipulation. For example, in some embodiments selective hybridization conditions would be when at least about, 60, 65, 70, 71, 72, 73, 74, 75, 76, 77, 78, 79, 80, 81, 82, 83, 84, 85, 86, 87, 88, 89, 90, 91, 92, 93, 94, 95, 96, 97, 98, 99, 100 percent of the primer is enzymatically manipulated under conditions which promote the enzymatic manipulation, for example if the enzymatic manipulation is DNA extension, then selective hybridization conditions would be when at least about 60, 65, 70, 71, 72, 73, 74, 75, 76, 77, 78, 79, 80, 81, 82, 83, 84, 85, 86, 87, 88, 89, 90, 91, 92, 93, 94, 95, 96, 97, 98, 99, 100 percent of the primer molecules are extended. Preferred conditions also include those suggested by the manufacturer or indicated in the art as being appropriate for the enzyme performing the manipulation.

[0099] Just as with homology, it is understood that there are a variety of methods herein disclosed for determining the level of hybridization between two nucleic acid molecules. It is understood that these methods and conditions may provide different percentages of hybridization between two nucleic acid molecules, but unless otherwise indicated meeting the parameters of any of the methods would be sufficient. For example if 80% hybridization was required and as long as hybridization occurs within the required parameters in any one of these methods it is considered disclosed herein.

[0100] It is understood that those of skill in the art understand that if a composition or method meets any one of these criteria for determining hybridization either collectively or singly it is a composition or method that is disclosed herein.

[0101] 3. Nucleic Acids

[0102] There are a variety of molecules disclosed herein that are nucleic acid based, including for example the nucleic acids that encode, for example FVIII, as well as various functional nucleic acids. The disclosed nucleic acids are made up of for example, nucleotides, nucleotide analogs, or nucleotide substitutes. Non-limiting examples of these and other molecules are discussed herein. It is understood that, for example, when a vector is expressed in a cell, the expressed mRNA will typically be made up of A, C, G, and U. Likewise, it is understood that if, for example, an antisense molecule is introduced into a cell or cell environment through for example exogenous delivery, it is advantageous that the antisense molecule be made up of nucleotide analogs that reduce the degradation of the antisense molecule in the cellular environment.

[0103] a) Nucleotides and Related Molecules

[0104] A nucleotide is a molecule that contains a base moiety, a sugar moiety and a phosphate moiety. Nucleotides can be linked together through their phosphate moieties and sugar moieties creating an internucleoside linkage. The base moiety of a nucleotide can be adenin-9-yl (A), cytosin-1-yl (C), guanin-9-yl (G), uracil-1-yl (U), and thymin-1-yl (T). The sugar moiety of a nucleotide is a ribose or a deoxyribose. The phosphate moiety of a nucleotide is pentavalent phosphate. An non-limiting example of a nucleotide would be 3′-AMP (3′-adenosine monophosphate) or 5′-GMP (5′-guanosine monophosphate).

[0105] A nucleotide analog is a nucleotide which contains some type of modification to either the base, sugar, or phosphate moieties. Modifications to the base moiety would include natural and synthetic modifications of A, C, G, and T/U as well as different purine or pyrimidine bases, such as uracil-5-yl (.psi.), hypoxanthin-9-yl (I), and 2-aminoadenin-9-yl. A modified base includes but is not limited to 5-methylcytosine (5-me-C), 5-hydroxymethyl cytosine, xanthine, hypoxanthine, 2-aminoadenine, 6-methyl and other alkyl derivatives of adenine and guanine, 2-propyl and other alkyl derivatives of adenine and guanine, 2-thiouracil, 2-thiothymine and

[0106] 2-thiocytosine, 5-halouracil and cytosine, 5-propynyl uracil and cytosine, 6-azo uracil, cytosine and thymine, 5-uracil (pseudouracil), 4-thiouracil, 8-halo, 8-amino, 8-thiol, 8-thioalkyl, 8-hydroxyl and other 8-substituted adenines and guanines, 5-halo particularly 5-bromo, 5-trifluoromethyl and other 5-substituted uracils and cytosines, 7-methylguanine and 7-methyladenine, 8-azaguanine and 8-azaadenine, 7-deazaguanine and 7-deazaadenine and 3-deazaguanine and 3-deazaadenine. Additional base modifications can be found for example in U.S. Pat. No. 3,687,808, Englisch et al., Angewandte Chemie, International Edition, 1991, 30, 613, and Sanghvi, Y. S., Chapter 15, Antisense Research and Applications, pages 289-302, Crooke, S. T. and Lebleu, B. ed., CRC Press, 1993. Certain nucleotide analogs, such as 5-substituted pyrimidines, 6-azapyrimidines and N-2, N-6 and O-6 substituted purines, including 2-aminopropyladenine, 5-propynyluracil and 5-propynylcytosine. 5-methylcytosine can increase the stability of duplex formation. Often time base modifications can be combined with for example a sugar modification, such as 2′-O-methoxyethyl, to achieve unique properties such as increased duplex stability. There are numerous United States patents such as U.S. Pat. Nos. 4,845,205; 5,130,302; 5,134,066; 5,175,273; 5,367,066; 5,432,272; 5,457,187; 5,459,255; 5,484,908; 5,502,177; 5,525,711; 5,552,540; 5,587,469; 5,594,121, 5,596,091; 5,614,617; and 5,681,941, which detail and describe a range of base modifications. Each of these patents is herein incorporated by reference.

[0107] Nucleotide analogs can also include modifications of the sugar moiety. Modifications to the sugar moiety would include natural modifications of the ribose and deoxy ribose as well as synthetic modifications. Sugar modifications include but are not limited to the following modifications at the 2′ position: OH; F; O-, S-, or N-alkyl; O-, S-, or N-alkenyl; O-, S- or N-alkynyl; or O-alkyl-O-alkyl, wherein the alkyl, alkenyl and alkynyl may be substituted or unsubstituted C₁ to C₁₀, alkyl or C₂ to C₁₀ alkenyl and alkynyl. 2′ sugar modifications also include but are not limited to —O[(CH₂)ₙO]ₘ CH₃, —O(CH₂)ₙ OCH₃, —O(CH₂)ₙ NH₂, —O(CH₂)ₙ CH₃, —O(CH₂)ₙ—ONH₂, and —O(CH₂)ₙON[(CH₂)ₙCH₃)]₂, where n and m are from 1 to about 10.

[0108] Other modifications at the 2′ position include but are not limited to: C₁ to C₁₀ lower alkyl, substituted lower alkyl, alkaryl, aralkyl, O-alkaryl or O-aralkyl, SH, SCH₃, OCN, Cl, Br, CN, CF₃, OCF₃, SOCH₃, SO₂ CH₃, ONO₂, NO₂, N₃, NH₂, heterocycloalkyl, heterocycloalkaryl, aminoalkylamino, polyalkylamino, substituted silyl, an RNA cleaving group, a reporter group, an intercalator, a group for improving the pharmacokinetic properties of an oligonucleotide, or a group for improving the pharmacodynamic properties of an oligonucleotide, and other substituents having similar properties. Similar modifications may also be made at other positions on the sugar, particularly the 3′ position of the sugar on the 3′ terminal nucleotide or in 2′-5′ linked oligonucleotides and the 5′ position of 5′ terminal nucleotide. Modified sugars would also include those that contain modifications at the bridging ring oxygen, such as CH₂ and S. Nucleotide sugar analogs may also have sugar mimetics such as cyclobutyl moieties in place of the pentofuranosyl sugar. There are numerous United States patents that teach the preparation of such modified sugar structures such as U.S. Pat. Nos. 4,981,957; 5,118,800; 5,319,080; 5,359,044; 5,393,878; 5,446,137; 5,466,786; 5,514,785; 5,519,134; 5,567,811; 5,576,427; 5,591,722; 5,597,909; 5,610,300; 5,627,053; 5,639,873; 5,646,265; 5,658,873; 5,670,633; and 5,700,920, each of which is herein incorporated by reference in its entirety.

[0109] Nucleotide analogs can also be modified at the phosphate moiety. Modified phosphate moieties include but are not limited to those that can be modified so that the linkage between two nucleotides contains a phosphorothioate, chiral phosphorothioate, phosphorodithioate, phosphotriester, aminoalkylphosphotriester, methyl and other alkyl phosphonates including 3′-alkylene phosphonate and chiral phosphonates, phosphinates, phosphoramidates including 3′-amino phosphoramidate and aminoalkylphosphoramidates, thionophosphoramidates, thionoalkylphosphonates, thionoalkylphosphotriesters, and boranophosphates. It is understood that these phosphate or modified phosphate linkage between two nucleotides can be through a 3′-5′ linkage or a 2′-5′ linkage, and the linkage can contain inverted polarity such as 3′-5′ to 5′-3′ or 2′-5′ to 5′-2′. Various salts, mixed salts and free acid forms are also included. Numerous United States patents teach how to make and use nucleotides containing modified phosphates and include but are not limited to, U.S. Pat. Nos. 3,687,808; 4,469,863; 4,476,301; 5,023,243; 5,177,196; 5,188,897; 5,264,423; 5,276,019; 5,278,302; 5,286,717; 5,321,131; 5,399,676; 5,405,939; 5,453,496; 5,455,233; 5,466,677; 5,476,925; 5,519,126; 5,536,821; 5,541,306; 5,550,111; 5,563,253; 5,571,799; 5,587,361; and 5,625,050, each of which is herein incorporated by reference.

[0110] It is understood that nucleotide analogs need only contain a single modification, but may also contain multiple modifications within one of the moieties or between different moieties.

[0111] Nucleotide substitutes are molecules having similar functional properties to nucleotides, but which do not contain a phosphate moiety, such as peptide nucleic acid (PNA). Nucleotide substitutes are molecules that will recognize nucleic acids in a Watson-Crick or Hoogsteen manner, but which are linked together through a moiety other than a phosphate moiety. Nucleotide substitutes are able to conform to a double helix type structure when interacting with the appropriate target nucleic acid.

[0112] Nucleotide substitutes are nucleotides or nucleotide analogs that have had the phosphate moiety and/or sugar moieties replaced. Nucleotide substitutes do not contain a standard phosphorus atom. Substitutes for the phosphate can be for example, short chain alkyl or cycloalkyl internucleoside linkages, mixed heteroatom and alkyl or cycloalkyl internucleoside linkages, or one or more short chain heteroatomic or heterocyclic internucleoside linkages. These include those having morpholino linkages (formed in part from the sugar portion of a nucleoside); siloxane backbones; sulfide, sulfoxide and sulfone backbones; formacetyl and thioformacetyl backbones; methylene formacetyl and thioformacetyl backbones; alkene containing backbones; sulfamate backbones; methyleneimino and methylenehydrazino backbones; sulfonate and sulfonamide backbones; amide backbones; and others having mixed N, O, S and CH₂ component parts. Numerous United States patents disclose how to make and use these types of phosphate replacements and include but are not limited to U.S. Pat. Nos. 5,034,506; 5,166,315; 5,185,444; 5,214,134; 5,216,141; 5,235,033; 5,264,562; 5,264,564; 5,405,938; 5,434,257; 5,466,677; 5,470,967; 5,489,677; 5,541,307; 5,561,225; 5,596,086; 5,602,240; 5,610,289; 5,602,240; 5,608,046; 5,610,289; 5,618,704; 5,623,070; 5,663,312; 5,633,360; 5,677,437; and 5,677,439, each of which is herein incorporated by reference.

[0113] It is also understood in a nucleotide substitute that both the sugar and the phosphate moieties of the nucleotide can be replaced, by for example an amide type linkage (aminoethylglycine) (PNA). U.S. Pat. Nos. 5,539,082; 5,714,331; and 5,719,262 teach how to make and use PNA molecules, each of which is herein incorporated by reference. (See also Nielsen et al., Science, 1991, 254, 1497-1500).

[0114] It is also possible to link other types of molecules (conjugates) to nucleotides or nucleotide analogs to enhance for example, cellular uptake. Conjugates can be chemically linked to the nucleotide or nucleotide analogs. Such conjugates include but are not limited to lipid moieties such as a cholesterol moiety (Letsinger et al., Proc. Natl. Acad. Sci. USA, 1989,

[0115] 86, 6553-6556), cholic acid (Manoharan et al., Bioorg. Med. Chem. Let., 1994, 4, 1053-1060), a thioether, e.g., hexyl-S-tritylthiol (Manoharan et al., Ann. N.Y. Acad. Sci., 1992, 660, 306-309; Manoharan et al., Bioorg. Med. Chem. Let., 1993, 3, 2765-2770), a thiocholesterol (Oberhauser et al., Nucl. Acids Res., 1992, 20, 533-538), an aliphatic chain, e.g., dodecandiol or undecyl residues (Saison-Behmoaras et al., EMBO J., 1991, 10, 1111-1118; Kabanov et al., FEBS Lett., 1990, 259, 327-330; Svinarchuk et al., Biochimie, 1993, 75, 49-54), a phospholipid, e.g., di-hexadecyl-rac-glycerol or triethylammonium 1,2-di-O-hexadecyl-rac-glycero-3-H-phosphonate (Manoharan et al., Tetrahedron Lett., 1995, 36, 3651-3654; Shea et al., Nucl. Acids Res., 1990, 18, 3777-3783), a polyamine or a polyethylene glycol chain (Manoharan et al., Nucleosides & Nucleotides, 1995, 14, 969-973), or adamantane acetic acid (Manoharan et al., Tetrahedron Lett., 1995, 36, 3651-3654), a palmityl moiety (Mishra et al., Biochim. Biophys. Acta, 1995, 1264, 229-237), or an octadecylamine or hexylamino-carbonyl-oxycholesterol moiety (Crooke et al., J. Pharmacol. Exp. Ther., 1996, 277, 923-937. Numerous United States patents teach the preparation of such conjugates and include, but are not limited to U.S. Pat. Nos. 4,828,979; 4,948,882; 5,218,105; 5,525,465; 5,541,313; 5,545,730; 5,552,538; 5,578,717, 5,580,731; 5,580,731; 5,591,584; 5,109,124; 5,118,802; 5,138,045; 5,414,077; 5,486,603; 5,512,439; 5,578,718; 5,608,046; 4,587,044; 4,605,735; 4,667,025; 4,762,779; 4,789,737; 4,824,941; 4,835,263; 4,876,335; 4,904,582; 4,958,013; 5,082,830; 5,112,963; 5,214,136; 5,082,830; 5,112,963; 5,214,136; 5,245,022; 5,254,469; 5,258,506; 5,262,536; 5,272,250; 5,292,873; 5,317,098; 5,371,241, 5,391,723; 5,416,203, 5,451,463; 5,510,475; 5,512,667; 5,514,785; 5,565,552; 5,567,810; 5,574,142; 5,585,481; 5,587,371; 5,595,726; 5,597,696; 5,599,923; 5,599,928 and 5,688,941, each of which is herein incorporated by reference.

[0116] A Watson-Crick interaction is at least one interaction with the Watson-Crick face of a nucleotide, nucleotide analog, or nucleotide substitute. The Watson-Crick face of a nucleotide, nucleotide analog, or nucleotide substitute includes the C2, N1, and C6 positions of a purine based nucleotide, nucleotide analog, or nucleotide substitute and the C2, N3, C4 positions of a pyrimidine based nucleotide, nucleotide analog, or nucleotide substitute.

[0117] A Hoogsteen interaction is the interaction that takes place on the Hoogsteen face of a nucleotide or nucleotide analog, which is exposed in the major groove of duplex DNA. The Hoogsteen face includes the N7 position and reactive groups (NH2 or O) at the C6 position of purine nucleotides.

[0118] b) Sequences

[0119] There are a variety of sequences related to the FVIII gene, these sequences and others are attached.

[0120] c) Primers and Probes

[0121] Disclosed are compositions including primers and probes, which are capable of interacting with the FVIII gene as disclosed herein. In certain embodiments the primers are used to support DNA amplification reactions. Typically the primers will be capable of being extended in a sequence specific manner. Extension of a primer in a sequence specific manner includes any methods wherein the sequence and/or composition of the nucleic acid molecule to which the primer is hybridized or otherwise associated directs or influences the composition or sequence of the product produced by the extension of the primer. Extension of the primer in a sequence specific manner therefore includes, but is not limited to, PCR, DNA sequencing, DNA extension, DNA polymerization, RNA transcription, or reverse transcription. Techniques and conditions that amplify the primer in a sequence specific manner are preferred. In certain embodiments the primers are used for the DNA amplification reactions, such as PCR or direct sequencing. It is understood that in certain embodiments the primers can also be extended using non-enzymatic techniques, where for example, the nucleotides or oligonucleotides used to extend the primer are modified such that they will chemically react to extend the primer in a sequence specific manner. Typically the disclosed primers hybridize with the FVIII gene or region of the FVIII gene or they hybridize with the complement of the FVIII gene or complement of a region of the FVIII gene.

[0122] The size of the primers or probes for interaction with the FVIII gene in certain embodiments can be any size that supports the desired enzymatic manipulation of the primer, such as DNA amplification or the simple hybridization of the probe or primer. A typical FVIII haplotype primer or probe would be at least 6, 7, 8, 9, 10, 11, 12, 13, 14, 15, 16, 17, 18, 19, 20, 21, 22, 23, 24, 25, 26, 27, 28, 29, 30, 31, 32, 33, 34, 35, 36, 37, 38, 39, 40, 41, 42, 43, 44, 45, 46, 47, 48, 49, 50, 51, 52, 53, 54, 55, 56, 57, 58, 59, 60, 61, 62, 63, 64, 65, 66, 67, 68, 69, 70, 71, 72, 73, 74, 75, 76, 77, 78, 79, 80, 81, 82, 83, 84, 85, 86, 87, 88, 89, 90, 91, 92, 93, 94, 95, 96, 97, 98, 99, 100, 125, 150, 175, 200, 225, 250, 275, 300, 325, 350, 375, 400, 425, 450, 475, 500, 550, 600, 650, 700, 750, 800, 850, 900, 950, 1000, 1250, 1500, 1750, 2000, 2250, 2500, 2750, 3000, 3500, or 4000 nucleotides long.

[0123] In other embodiments the primer or probe can be less than or equal to 6, 7, 8, 9, 10, 11, 12 13, 14, 15, 16, 17, 18, 19, 20, 21, 22, 23, 24, 25, 26, 27, 28, 29, 30, 31, 32, 33, 34, 35, 36, 37, 38, 39, 40, 41, 42, 43, 44, 45, 46, 47, 48, 49, 50, 51, 52, 53, 54, 55, 56, 57, 58, 59, 60, 61, 62, 63, 64, 65, 66, 67, 68, 69, 70, 71, 72, 73, 74, 75, 76, 77, 78, 79, 80, 81, 82, 83, 84, 85, 86, 87, 88, 89, 90, 91, 92, 93, 94, 95, 96, 97, 98, 99, 100, 125, 150, 175, 200, 225, 250, 275, 300, 325, 350, 375, 400, 425, 450, 475, 500, 550, 600, 650, 700, 750, 800, 850, 900, 950, 1000, 1250, 1500, 1750, 2000, 2250, 2500, 2750, 3000, 3500, or 4000 nucleotides long.

[0124] The primers for the FVIII gene typically will be used to produce an amplified DNA product that contains the FVIII gene. In general, typically the size of the product will be such that the size can be accurately determined to within 3, or 2 or 1 nucleotides.

[0125] d) Nucleic Acid Delivery

[0126] The haplotypes disclosed herein can be useful with various methods of nucleic acid delivery. For example, in a subject with a given haplotype of FVIH, the corresponding nucleic acid of that haplotype can be administered to the subject, thereby increasing the amount of the proper haplotype if FVIII in that particular subject, thereby decreasing adverse reactions to the expressed protein. In the methods described above which include the administration and uptake of exogenous DNA into the cells of a subject (i.e., gene transduction or transfection), the disclosed nucleic acids can be in the form of naked DNA or RNA, or the nucleic acids can be in a vector for delivering the nucleic acids to the cells, whereby the antibody-encoding DNA fragment is under the transcriptional regulation of a promoter, as would be well understood by one of ordinary skill in the art. The vector can be a commercially available preparation, such as an adenovirus vector (Quantum Biotechnologies, Inc. (Laval, Quebec, Canada). Delivery of the nucleic acid or vector to cells can be via a variety of mechanisms. As one example, delivery can be via a liposome, using commercially available liposome preparations such as LIPOFECTIN, LIPOFECTAMINE (GIBCO-BRL, Inc., Gaithersburg, Md.), SUPERFECT (Qiagen, Inc. Hilden, Germany) and TRANSFECTAM (Promega Biotec, Inc., Madison, Wis.), as well as other liposomes developed according to procedures standard in the art. In addition, the disclosed nucleic acid or vector can be delivered in vivo by electroporation, the technology for which is available from Genetronics, Inc. (San Diego, Calif.) as well as by means of a SONOPORATION machine (ImaRx Pharmaceutical Corp., Tucson, Ariz.).

[0127] As one example, vector delivery can be via a viral system, such as a retroviral vector system which can package a recombinant retroviral genome (see e.g., Pastan et al., Proc. Natl. Acad. Sci. U.S.A. 85:4486, 1988; Miller et al., Mol. Cell. Biol. 6:2895, 1986). The recombinant retrovirus can then be used to infect and thereby deliver to the infected cells nucleic acid encoding a broadly neutralizing antibody (or active fragment thereof). The exact method of introducing the altered nucleic acid into mammalian cells is, of course, not limited to the use of retroviral vectors. Other techniques are widely available for this procedure including the use of adenoviral vectors (Mitani et al., Hum. Gene Ther. 5:941-948, 1994), adeno-associated viral (AAV) vectors (Goodman et al., Blood 84:1492-1500, 1994), lentiviral vectors (Naidini et al., Science 272:263-267, 1996), pseudotyped retroviral vectors (Agrawal et al., Exper. Hematol. 24:738-747, 1996). Physical transduction techniques can also be used, such as liposome delivery and receptor-mediated and other endocytosis mechanisms (see, for example, Schwartzenberger et al., Blood 87:472-478, 1996). This disclosed compositions and methods can be used in conjunction with any of these or other commonly used gene transfer methods.

[0128] As one example, if the antibody-encoding nucleic acid is delivered to the cells of a subject in an adenovirus vector, the dosage for administration of adenovirus to humans can range from about 10⁷ to 10⁹ plaque forming units (pfu) per injection but can be as high as 10¹² pfu per injection (Crystal, Hum. Gene Ther. 8:985-1001, 1997; Alvarez and Curiel, Hum. Gene Ther. 8:597-613, 1997). A subject can receive a single injection, or, if additional injections are necessary, they can be repeated at six month intervals (or other appropriate time intervals, as determined by the skilled practitioner) for an indefinite period and/or until the efficacy of the treatment has been established.

[0129] Parenteral administration of the nucleic acid or vector, if used, is generally characterized by injection. Injectables can be prepared in conventional forms, either as liquid solutions or suspensions, solid forms suitable for solution of suspension in liquid prior to injection, or as emulsions. A more recently revised approach for parenteral administration involves use of a slow release or sustained release system such that a constant dosage is maintained. For additional discussion of suitable formulations and various routes of administration of therapeutic compounds, see, e.g., Remington: The Science and Practice of Pharmacy (19th ed.) ed. A. R. Gennaro, Mack Publishing Company, Easton, Pa. 1995.

[0130] There are a number of compositions and methods which can be used to deliver nucleic acids to cells, either in vitro or in vivo. These methods and compositions can largely be broken down into two classes: viral based delivery systems and non-viral based delivery systems. For example, the nucleic acids can be delivered through a number of direct delivery systems such as, electroporation, lipofection, calcium phosphate precipitation, plasmids, viral vectors, viral nucleic acids, phage nucleic acids, phages, cosmids, or via transfer of genetic material in cells or carriers such as cationic liposomes. Appropriate means for transfection, including viral vectors, chemical transfectants, or physico-mechanical methods such as electroporation and direct diffusion of DNA, are described by, for example, Wolff, J. A., et al., Science, 247, 1465-1468, (1990); and Wolff, J. A. Nature, 352, 815-818, (1991) Such methods are well known in the art and readily adaptable for use with the compositions and methods described herein. In certain cases, the methods will be modified to specifically function with large DNA molecules. Further, these methods can be used to target certain diseases and cell populations by using the targeting characteristics of the carrier.

[0131] Transfer vectors can be any nucleotide construction used to deliver genes into cells (e.g., a plasmid), or as part of a general strategy to deliver genes, e.g., as part of recombinant retrovirus or adenovirus (Ram et al. Cancer Res. 53:83-88, (1993)).

[0132] As used herein, plasmid or viral vectors are agents that transport the disclosed nucleic acids, such as a given haplotype of FVIII into the cell without degradation and include a promoter yielding expression of the gene in the cells into which it is delivered. Viral vectors are, for example, Adenovirus, Adeno-associated virus, Herpes virus, Vaccinia virus, Polio virus, AIDS virus, neuronal trophic virus, Sindbis and other RNA viruses, including these viruses with the HIV backbone. Also preferred are any viral families which share the properties of these viruses which make them suitable for use as vectors. Retroviruses include Murine Maloney Leukemia virus, MMLV, and retroviruses that express the desirable properties of MMLV as a vector. Retroviral vectors are able to carry a larger genetic payload, i.e., a transgene or marker gene, than other viral vectors, and for this reason are a commonly used vector. However, they are not as useful in non-proliferating cells. Adenovirus vectors are relatively stable and easy to work with, have high titers, and can be delivered in aerosol formulation, and can transfect non-dividing cells. Pox viral vectors are large and have several sites for inserting genes, they are thermostable and can be stored at room temperature. A preferred embodiment is a viral vector which has been engineered so as to suppress the immune response of the host organism, elicited by the viral antigens. Preferred vectors of this type will carry coding regions for Interleukin 8 or 10.

[0133] Viral vectors can have higher transaction (ability to introduce genes) abilities than chemical or physical methods to introduce genes into cells. Typically, viral vectors contain, nonstructural early genes, structural late genes, an RNA polymerase III transcript, inverted terminal repeats necessary for replication and encapsidation, and promoters to control the transcription and replication of the viral genome. When engineered as vectors, viruses typically have one or more of the early genes removed and a gene or gene/promotor cassette is inserted into the viral genome in place of the removed viral DNA. Constructs of this type can carry up to about 8 kb of foreign genetic material. The necessary functions of the removed early genes are typically supplied by cell lines which have been engineered to express the gene products of the early genes in trans.

[0134] (1) Retroviral Vectors

[0135] A retrovirus is an animal virus belonging to the virus family of Retroviridae, including any types, subfamilies, genus, or tropisms. Retroviral vectors, in general, are described by Verma, I. M., Retroviral vectors for gene transfer. In Microbiology-1985, American Society for Microbiology, pp. 229-232, Washington, (1985), which is incorporated by reference herein. Examples of methods for using retroviral vectors for gene therapy are described in U.S. Pat. Nos. 4,868,116 and 4,980,286; PCT applications WO 90/02806 and WO 89/07136; and Mulligan, (Science 260:926-932 (1993)); the teachings of which are incorporated herein by reference.

[0136] A retrovirus is essentially a package which has packed into it nucleic acid cargo. The nucleic acid cargo carries with it a packaging signal, which ensures that the replicated daughter molecules will be efficiently packaged within the package coat. In addition to the package signal, there are a number of molecules which are needed in cis, for the replication, and packaging of the replicated virus. Typically a retroviral genome, contains the gag, pol, and env genes which are involved in the making of the protein coat. It is the gag, pol, and env genes which are typically replaced by the foreign DNA that it is to be transferred to the target cell. Retrovirus vectors typically contain a packaging signal for incorporation into the package coat, a sequence which signals the start of the gag transcription unit, elements necessary for reverse transcription, including a primer binding site to bind the tRNA primer of reverse transcription, terminal repeat sequences that guide the switch of RNA strands during DNA synthesis, a purine rich sequence 5′ to the 3′LTR that serve as the priming site for the synthesis of the second strand of DNA synthesis, and specific sequences near the ends of the LTRs that enable the insertion of the DNA state of the retrovirus to insert into the host genome. The removal of the gag, pol, and env genes allows for about 8 kb of foreign sequence to be inserted into the viral genome, become reverse transcribed, and upon replication be packaged into a new retroviral particle. This amount of nucleic acid is sufficient for the delivery of a one to many genes depending on the size of each transcript. It is preferable to include either positive or negative selectable markers along with other genes in the insert.

[0137] Since the replication machinery and packaging proteins in most retroviral vectors have been removed (gag, pol, and env), the vectors are typically generated by placing them into a packaging cell line. A packaging cell line is a cell line which has been transfected or transformed with a retrovirus that contains the replication and packaging machinery, but lacks any packaging signal. When the vector carrying the DNA of choice is transfected into these cell lines, the vector containing the gene of interest is replicated and packaged into new retroviral particles, by the machinery provided in cis by the helper cell. The genomes for the machinery are not packaged because they lack the necessary signals.

[0138] (2) Adenoviral Vectors

[0139] The construction of replication-defective adenoviruses has been described (Berkner et al., J. Virology 61:1213-1220 (1987); Massie et al., Mol. Cell. Biol. 6:2872-2883 (1986); Haj-Ahmad et al., J. Virology 57:267-274 (1986); Davidson et al., J. Virology 61:1226-1239 (1987); Zhang “Generation and identification of recombinant adenovirus by liposome-mediated transfection and PCR analysis” BioTechniques 15:868-872 (1993)). The benefit of the use of these viruses as vectors is that they are limited in the extent to which they can spread to other cell types, since they can replicate within an initial infected cell, but are unable to form new infectious viral particles. Recombinant adenoviruses have been shown to achieve high efficiency gene transfer after direct, in vivo delivery to airway epithelium, hepatocytes, vascular endothelium, CNS parenchyma and a number of other tissue sites (Morsy, J. Clin. Invest. 92:1580-1586 (1993); Kirshenbaum, J. Clin. Invest. 92:381-387 (1993); Roessler, J. Clin. Invest. 92:1085-1092 (1993); Moullier, Nature Genetics 4:154-159 (1993); La Salle, Science 259:988-990 (1993); Gomez-Foix, J. Biol. Chem. 267:25129-25134 (1992); Rich, Human Gene Therapy 4:461-476 (1993); Zabner, Nature Genetics 6:75-83 (1994); Guzman, Circulation Research 73:1201-1207 (1993); Bout, Human Gene Therapy 5:3-10 (1994); Zabner, Cell 75:207-216 (1993); Caillaud, Eur. J. Neuroscience 5:1287-1291 (1993); and Ragot, J. Gen. Virology 74:501-507 (1993)). Recombinant adenoviruses achieve gene transduction by binding to specific cell surface receptors, after which the virus is internalized by receptor-mediated endocytosis, in the same manner as wild type or replication-defective adenovirus (Chardonnet and Dales, Virology 40:462-477 (1970); Brown and Burlingham, J. Virology 12:386-396 (1973); Svensson and Persson, J. Virology 55:442-449 (1985); Seth, et al., J. Virol. 51:650-655 (1984); Seth, et al., Mol. Cell. Biol. 4:1528-1533 (1984); Varga et al., J. Virology 65:6061-6070 (1991); Wickham et al., Cell 73:309-319 (1993)).

[0140] A viral vector can be one based on an adenovirus which has had the E1 gene removed and these virons are generated in a cell line such as the human 293 cell line. In another preferred embodiment both the E1 and E3 genes are removed from the adenovirus genome.

[0141] (3) Adeno-Associated Viral Vectors

[0142] Another type of viral vector is based on an adeno-associated virus (AAV).

[0143] This defective parvovirus is a preferred vector because it can infect many cell types and is nonpathogenic to humans. AAV type vectors can transport about 4 to 5 kb and wild type AAV is known to stably insert into chromosome 19. Vectors which contain this site specific integration property are preferred. An especially preferred embodiment of this type of vector is the P4.1 C vector produced by Avigen, San Francisco, Calif., which can contain the herpes simplex virus thymidine kinase gene, HSV-tk, and/or a marker gene, such as the gene encoding the green fluorescent protein, GFP.

[0144] In another type of AAV virus, the AAV contains a pair of inverted terminal repeats (ITRs) which flank at least one cassette containing a promoter which directs cell-specific expression operably linked to a heterologous gene. Heterologous in this context refers to any nucleotide sequence or gene which is not native to the AAV or B19 parvovirus.

[0145] Typically the AAV and B19 coding regions have been deleted, resulting in a safe, noncytotoxic vector. The AAV ITRs, or modifications thereof, confer infectivity and site-specific integration, but not cytotoxicity, and the promoter directs cell-specific expression. U.S. Pat. No. 6,261,834 is herein incorporated by reference for material related to the AAV vector.

[0146] The disclosed vectors thus provide DNA molecules which are capable of integration into a mammalian chromosome without substantial toxicity.

[0147] The inserted genes in viral and retroviral usually contain promoters, and/or enhancers to help control the expression of the desired gene product. A promoter is generally a sequence or sequences of DNA that function when in a relatively fixed location in regard to the transcription start site. A promoter contains core elements required for basic interaction of RNA polymerase and transcription factors, and may contain upstream elements and response elements.

[0148] (4) Large Payload Viral Vectors

[0149] Molecular genetic experiments with large human herpesviruses have provided a means whereby large heterologous DNA fragments can be cloned, propagated and established in cells permissive for infection with herpesviruses (Sun et al., Nature genetics 8: 33-41, 1994; Cotter and Robertson, Curr Opin Mol Ther 5: 633-644, 1999). These large DNA viruses (herpes simplex virus (HSV) and Epstein-Barr virus (EBV), have the potential to deliver fragments of human heterologous DNA>150 kb to specific cells. EBV recombinants can maintain large pieces of DNA in the infected B-cells as episomal DNA. Individual clones carried human genomic inserts up to 330 kb appeared genetically stable The maintenance of these episomes requires a specific EBV nuclear protein, EBNA1, constitutively expressed during infection with EBV. Additionally, these vectors can be used for transfection, where large amounts of protein can be generated transiently in vitro. Herpesvirus amplicon systems are also being used to package pieces of DNA>220 kb and to infect cells that can stably maintain DNA as episomes.

[0150] Other useful systems include, for example, replicating and host-restricted non-replicating vaccinia virus vectors.

[0151] e) Non-Nucleic Acid Based Systems

[0152] The disclosed compositions can be delivered to the target cells in a variety of ways. For example, the compositions can be delivered through electroporation, or through lipofection, or through calcium phosphate precipitation. The delivery mechanism chosen will depend in part on the type of cell targeted and whether the delivery is occurring for example in vivo or in vitro.

[0153] Thus, the compositions can comprise, in addition to the disclosed genes or vectors for example, lipids such as liposomes, such as cationic liposomes (e.g., DOTMA, DOPE, DC-cholesterol) or anionic liposomes. Liposomes can further comprise proteins to facilitate targeting a particular cell, if desired. Administration of a composition comprising a compound and a cationic liposome can be administered to the blood afferent to a target organ or inhaled into the respiratory tract to target cells of the respiratory tract. Regarding liposomes, see, e.g., Brigham et al. Am. J. Resp. Cell. Mol. Biol. 1:95-100 (1989); Felgner et al. Proc. Natl. Acad. Sci USA 84:7413-7417 (1987); U.S. Pat. No. 4,897,355. Furthermore, the compound can be administered as a component of a microcapsule that can be targeted to specific cell types, such as macrophages, or where the diffusion of the compound or delivery of the compound from the microcapsule is designed for a specific rate or dosage.

[0154] In the methods described above which include the administration and uptake of exogenous DNA into the cells of a subject (i.e., gene transduction or transfection), delivery of the compositions to cells can be via a variety of mechanisms. As one example, delivery can be via a liposome, using commercially available liposome preparations such as LIPOFECTIN, LIPOFECTAMINE (GIBCO-BRL, Inc., Gaithersburg, Md.), SUPERFECT (Qiagen, Inc. Hilden, Germany) and TRANSFECTAM (Promega Biotec, Inc., Madison, Wis.), as well as other liposomes developed according to procedures standard in the art. In addition, the disclosed nucleic acid or vector can be delivered in vivo by electroporation, the technology for which is available from Genetronics, Inc. (San Diego, Calif.) as well as by means of a SONOPORATION machine (ImaRx Pharmaceutical Corp., Tucson, Ariz.).

[0155] The materials may be in solution, suspension (for example, incorporated into microparticles, liposomes, or cells). These may be targeted to a particular cell type via antibodies, receptors, or receptor ligands. The following references are examples of the use of this technology to target specific proteins to tumor tissue (Senter, et al., Bioconjugate Chem., 2:447-451, (1991); Bagshawe, K. D., Br. J. Cancer, 60:275-281, (1989); Bagshawe, et al., Br. J. Cancer, 58:700-703, (1988); Senter, et al., Bioconjugate Chem., 4:3-9, (1993); Battelli, et al., Cancer Immunol. Immunother., 35:421-425, (1992); Pietersz and McKenzie, Immunolog. Reviews, 129:57-80, (1992); and Roffler, et al., Biochem. Pharmacol, 42:2062-2065, (1991)). These techniques can be used for a variety of other specific cell types. Vehicles such as “stealth” and other antibody conjugated liposomes (including lipid mediated drug targeting to colonic carcinoma), receptor mediated targeting of DNA through cell specific ligands, lymphocyte directed tumor targeting, and highly specific therapeutic retroviral targeting of murine glioma cells in vivo. The following references are examples of the use of this technology to target specific proteins to tumor tissue (Hughes et al., Cancer Research, 49:6214-6220, (1989); and Litzinger and Huang, Biochimica et Biophysica Acta, 1104:179-187, (1992)). In general, receptors are involved in pathways of endocytosis, either constitutive or ligand induced. These receptors cluster in clathrin-coated pits, enter the cell via clathrin-coated vesicles, pass through an acidified endosome in which the receptors are sorted, and then either recycle to the cell surface, become stored intracellularly, or are degraded in lysosomes. The internalization pathways serve a variety of functions, such as nutrient uptake, removal of activated proteins, clearance of macromolecules, opportunistic entry of viruses and toxins, dissociation and degradation of ligand, and receptor-level regulation. Many receptors follow more than one intracellular pathway, depending on the cell type, receptor concentration, type of ligand, ligand valency, and ligand concentration. Molecular and cellular mechanisms of receptor-mediated endocytosis has been reviewed (Brown and Greene, DNA and Cell Biology 10:6, 399-409 (1991)).

[0156] Nucleic acids that are delivered to cells which are to be integrated into the host cell genome, typically contain integration sequences. These sequences are often viral related sequences, particularly when viral based systems are used. These viral intergration systems can also be incorporated into nucleic acids which are to be delivered using a non-nucleic acid based system of deliver, such as a liposome, so that the nucleic acid contained in the delivery system can be come integrated into the host genome.

[0157] Other general techniques for integration into the host genome include, for example, systems designed to promote homologous recombination with the host genome. These systems typically rely on sequence flanking the nucleic acid to be expressed that has enough homology with a target sequence within the host cell genome that recombination between the vector nucleic acid and the target nucleic acid takes place, causing the delivered nucleic acid to be integrated into the host genome. These systems and the methods necessary to promote homologous recombination are known to those of skill in the art.

[0158] f) In Vivo/Ex Vivo

[0159] As described above, the compositions can be administered in a pharmaceutically acceptable carrier and can be delivered to the subject=s cells in vivo and/or ex vivo by a variety of mechanisms well known in the art (e.g., uptake of naked DNA, liposome fusion, intramuscular injection of DNA via a gene gun, endocytosis and the like).

[0160] If ex vivo methods are employed, cells or tissues can be removed and maintained outside the body according to standard protocols well known in the art. The compositions can be introduced into the cells via any gene transfer mechanism, such as, for example, calcium phosphate mediated gene delivery, electroporation, microinjection or proteoliposomes. The transduced cells can then be infused (e.g., in a pharmaceutically acceptable carrier) or homotopically transplanted back into the subject per standard methods for the cell or tissue type. Standard methods are known for transplantation or infusion of various cells into a subject.

[0161] 4. Expression Systems

[0162] The nucleic acids that are delivered to cells typically contain expression controlling systems. For example, the inserted genes in viral and retroviral systems usually contain promoters, and/or enhancers to help control the expression of the desired gene product. A promoter is generally a sequence or sequences of DNA that function when in a relatively fixed location in regard to the transcription start site. A promoter contains core elements required for basic interaction of RNA polymerase and transcription factors, and may contain upstream elements and response elements.

[0163] a) Viral Promoters and Enhancers

[0164] Preferred promoters controlling transcription from vectors in mammalian host cells may be obtained from various sources, for example, the genomes of viruses such as: polyoma, Simian Virus 40 (SV40), adenovirus, retroviruses, hepatitis-B virus and most preferably cytomegalovirus, or from heterologous mammalian promoters, e.g. beta actin promoter. The early and late promoters of the SV40 virus are conveniently obtained as an SV40 restriction fragment which also contains the SV40 viral origin of replication (Fiers et al., Nature, 273: 113 (1978)). The immediate early promoter of the human cytomegalovirus is conveniently obtained as a HindIII E restriction fragment (Greenway, P. J. et al., Gene 18: 355-360 (1982)). Of course, promoters from the host cell or related 0.0 species also are useful herein.

[0165] Enhancer generally refers to a sequence of DNA that functions at no fixed distance from the transcription start site and can be either 5′ (Laimins, L. et al., Proc. Natl. Acad. Sci. 78: 993 (1981)) or 3′ (Lusky, M. L., et al., Mol. Cell Bio. 3: 1108 (1983)) to the transcription unit. Furthermore, enhancers can be within an intron (Banerji, J. L. et al., Cell 33: 729 (1983)) as well as within the coding sequence itself (Osborne, T. F., et al., Mol. Cell Bio. 4: 1293 (1984)). They are usually between 10 and 300 bp in length, and they function in cis. Enhancers function to increase transcription from nearby promoters. Enhancers also often contain response elements that mediate the regulation of transcription. Promoters can also contain response elements that mediate the regulation of transcription. Enhancers often determine the regulation of expression of a gene. While many enhancer sequences are now known from mammalian genes (globin, elastase, albumin, -fetoprotein and insulin), typically one will use an enhancer from a eukaryotic cell virus for general expression. Preferred examples are the SV40 enhancer on the late side of the replication origin (bp 100-270), the cytomegalovirus early promoter enhancer, the polyoma enhancer on the late side of the replication origin, and adenovirus enhancers.

[0166] The promotor and/or enhancer may be specifically activated either by light or specific chemical events which trigger their function. Systems can be regulated by reagents such as tetracycline and dexamethasone. There are also ways to enhance viral vector gene expression by exposure to irradiation, such as gamma irradiation, or alkylating chemotherapy drugs.

[0167] In certain embodiments the promoter and/or enhancer region can act as a constitutive promoter and/or enhancer to maximize expression of the region of the transcription unit to be transcribed. In certain constructs the promoter and/or enhancer region be active in all eukaryotic cell types, even if it is only expressed in a particular type of cell at a particular time. A preferred promoter of this type is the CMV promoter (650 bases). Other preferred promoters are SV40 promoters, cytomegalovirus (full length promoter), and retroviral vector LTR.

[0168] It has been shown that all specific regulatory elements can be cloned and used to construct expression vectors that are selectively expressed in specific cell types such as melanoma cells. The glial fibrillary acetic protein (GFAP) promoter has been used to selectively express genes in cells of glial origin.

[0169] Expression vectors used in eukaryotic host cells (yeast, fungi, insect, plant, animal, human or nucleated cells) may also contain sequences necessary for the termination of transcription which may affect mRNA expression. These regions are transcribed as polyadenylated segments in the untranslated portion of the mRNA encoding tissue factor protein. The 3′ untranslated regions also include transcription termination sites. It is preferred that the transcription unit also contain a polyadenylation region. One benefit of this region is that it increases the likelihood that the transcribed unit will be processed and transported like mRNA. The identification and use of polyadenylation signals in expression constructs is well established. It is preferred that homologous polyadenylation signals be used in the transgene constructs. In certain transcription units, the polyadenylation region is derived from the SV40 early polyadenylation signal and consists of about 400 bases. It is also preferred that the transcribed units contain other standard sequences alone or in combination with the above sequences improve expression from, or stability of, the construct.

[0170] b) Markers

[0171] The viral vectors can include nucleic acid sequence encoding a marker product. This marker product is used to determine if the gene has been delivered to the cell and once delivered is being expressed. Preferred marker genes are the E. Coli lacZ gene, which encodes β-galactosidase, and green fluorescent protein.

[0172] In some embodiments the marker may be a selectable marker. Examples of suitable selectable markers for mammalian cells are dihydrofolate reductase (DHFR), thymidine kinase, neomycin, neomycin analog G418, hydromycin, and puromycin. When such selectable markers are successfully transferred into a mammalian host cell, the transformed mammalian host cell can survive if placed under selective pressure. There are two widely used distinct categories of selective regimes. The first category is based on a cell's metabolism and the use of a mutant cell line which lacks the ability to grow independent of a supplemented media. Two examples are: CHO DHFR-cells and mouse LTK-cells. These cells lack the ability to grow without the addition of such nutrients as thymidine or hypoxanthine. Because these cells lack certain genes necessary for a complete nucleotide synthesis pathway, they cannot survive unless the missing nucleotides are provided in a supplemented media. An alternative to supplementing the media is to introduce an intact DHFR or TK gene into cells lacking the respective genes, thus altering their growth requirements. Individual cells which were not transformed with the DHFR or TK gene will not be capable of survival in non-supplemented media.

[0173] The second category is dominant selection which refers to a selection scheme used in any cell type and does not require the use of a mutant cell line. These schemes typically use a drug to arrest growth of a host cell. Those cells which have a novel gene would express a protein conveying drug resistance and would survive the selection. Examples of such dominant selection use the drugs neomycin, (Southern P. and Berg, P., J. Molec. Appl. Genet. 1: 327 (1982)), mycophenolic acid, (Mulligan, R. C. and Berg, P. Science 209: 1422 (1980)) or hygromycin, (Sugden, B. et al., Mol. Cell. Biol. 5: 410-413 (1985)). The three examples employ bacterial genes under eukaryotic control to convey resistance to the appropriate drug G418 or neomycin (geneticin), xgpt (mycophenolic acid) or hygromycin, respectively. Others include the neomycin analog G418 and puramycin.

[0174] 5. Peptides

[0175] a) Protein Variants

[0176] As discussed herein there are numerous variants of the FVIII protein that are disclosed. As described above, the present invention provides at least four common non-synonymous-single-nucleotide-polymorphisms (nsSNPs), combinations of which represent six naturally-occurring allelic variants of the FVIII protein in the human population (FIG. 2). As such, six different haplotypic forms of the wt FVIII protein have been identified. These haplotypic forms have been designated: H1, H2, H3, H4, H5, and H6 (FIG. 3). Each of these variants represents a normal allelic variant of the FVIII protein since the individuals from whom the sequences were described have no bleeding disorders.

[0177] Protein variation, as described herein, applies generally to the design, synthesis, and recognition of proteins. However, the present invention is drawn to specific haplotypes with specific nucleic acid, and amino acid, sequences. These sequences need not be varied as disclosed herein, but can optionally contain other variances than those disclosed in haplotypes H1-H6.

[0178] Amino acid sequence modifications typically fall into one or more of three classes: substitutional, insertional or deletional variants. Insertions include amino and/or carboxyl terminal fusions as well as intrasequence insertions of single or multiple amino acid residues. Insertions ordinarily will be smaller insertions than those of amino or carboxyl terminal fusions, for example, on the order of one to four residues. Immunogenic fusion protein derivatives, such as those described in the examples, are made by fusing a polypeptide sufficiently large to confer immunogenicity to the target sequence by cross-linking in vitro or by recombinant cell culture transformed with DNA encoding the fusion. Deletions are characterized by the removal of one or more amino acid residues from the protein sequence. Typically, no more than about from 2 to 6 residues are deleted at any one site within the protein molecule. These variants ordinarily are prepared by site specific mutagenesis of nucleotides in the DNA encoding the protein, thereby producing DNA encoding the variant, and thereafter expressing the DNA in recombinant cell culture. Techniques for making substitution mutations at predetermined sites in DNA having a known sequence are well known, for example M13 primer mutagenesis and PCR mutagenesis. Amino acid substitutions are typically of single residues, but can occur at a number of different locations at once; insertions usually will be on the order of about from 1 to 10 amino acid residues; and deletions will range about from 1 to 30 residues. Deletions or insertions preferably are made in adjacent pairs, i.e. a deletion of 2 residues or insertion of 2 residues. Substitutions, deletions, insertions or any combination thereof may be combined to arrive at a final construct. The mutations must not place the sequence out of reading frame and preferably will not create complementary regions that could produce secondary mRNA structure. Substitutional variants are those in which at least one residue has been removed and a different residue inserted in its place. Such substitutions generally are made in accordance with the following Tables AAA and AAS and are referred to as conservative substitutions.

TABLE AAA
Amino Acid Abbreviations

| Amino Acid | Abbreviations |
|---|---|
| alanine | Ala, A |
| alloisoleucine | aIle |
| arginine | Arg, R |
| asparagine | Asn, N |
| aspartic acid | Asp, D |
| cysteine | Cys, C |
| glutamic acid | Glu, E |
| glutamine | Gln, K |
| glycine | Gly, G |
| histidine | His, H |
| isoleucine | Ile, I |
| leucine | Leu, L |
| lysine | Lys, K |
| phenylalanine | Phe, F |
| proline | Pro, P |
| pyroglutamic acid | pGlu |
| serine | Ser, S |
| threonine | Thr, T |
| tyrosine | Tyr, Y |
| tryptophan | Trp, W |
| valine | Val, V |

TABLE AAS
Amino Acid Substitutions

| | Exemplary Conservative Substitutions, others are |
|---|---|
| Original Residue | known in the art. |
| Ala | Ser |
| Arg | Lys; Gln |
| Asn | Gln; His |
| Asp | Glu |
| Cys | Ser |
| Gln | Asn; Lys |
| Glu | Asp |
| Gly | Pro |
| His | Asn; Gln |
| Ile | Leu; Val |
| Leu | Ile; Val |
| Lys | Arg; Gln |
| Met | Leu; Ile |
| Phe | Met; Leu; Tyr |
| Ser | Thr |
| Thr | Ser |
| Trp | Tyr |
| Tyr | Trp; Phe |
| Val | Ile; Leu |

[0179] Substantial changes in function or immunological identity are made by selecting substitutions that are less conservative than those in Table AAS, i.e., selecting residues that differ more significantly in their effect on maintaining (a) the structure of the polypeptide backbone in the area of the substitution, for example as a sheet or helical conformation, (b) the charge or hydrophobicity of the molecule at the target site or (c) the bulk of the side chain. The substitutions which in general are expected to produce the greatest changes in the protein properties will be those in which (a) a hydrophilic residue, e.g. seryl or threonyl, is substituted for (or by) a hydrophobic residue, e.g. leucyl, isoleucyl, phenylalanyl, valyl or alanyl; (b) a cysteine or proline is substituted for (or by) any other residue; (c) a residue having an electropositive side chain, e.g., lysyl, arginyl, or histidyl, is substituted for (or by) an electronegative residue, e.g., glutamyl or aspartyl; or (d) a residue having a bulky side chain, e.g., phenylalanine, is substituted for (or by) one not having a side chain, e.g., glycine, in this case, (e) by increasing the number of sites for sulfation and/or glycosylation.

[0180] For example, the replacement of one amino acid residue with another that is biologically and/or chemically similar is known to those skilled in the art as a conservative substitution. For example, a conservative substitution would be replacing one hydrophobic residue for another, or one polar residue for another. The substitutions include combinations such as, for example, Gly, Ala; Val, Ile, Leu; Asp, Glu; Asn, Gin; Ser, Thr; Lys, Arg; and Phe, Tyr. Such conservatively substituted variations of each explicitly disclosed sequence are included within the mosaic polypeptides provided herein.

[0181] Substitutional or deletional mutagenesis can be employed to insert sites for N-glycosylation (Asn-X-Thr/Ser) or O-glycosylation (Ser or Thr). Deletions of cysteine or other labile residues also may be desirable. Deletions or substitutions of potential proteolysis sites, e.g. Arg, is accomplished for example by deleting one of the basic residues or substituting one by glutaminyl or histidyl residues.

[0182] Certain post-translational derivatizations are the result of the action of recombinant host cells on the expressed polypeptide. Glutaminyl and asparaginyl residues are frequently post-translationally deamidated to the corresponding glutamyl and asparyl residues. Alternatively, these residues are deamidated under mildly acidic conditions. Other post-translational modifications include hydroxylation of proline and lysine, phosphorylation of hydroxyl groups of seryl or threonyl residues, methylation of the o-amino groups of lysine, arginine, and histidine side chains (T. E. Creighton, Proteins: Structure and Molecular Properties, W. H. Freeman & Co., San Francisco pp 79-86 [1983]), acetylation of the N-terminal amine and, in some instances, amidation of the C-terminal carboxyl.

[0183] It is understood that one way to define the variants and derivatives of the disclosed proteins herein is through defining the variants and derivatives in terms of homology/identity to specific known sequences. Specifically disclosed are variants of these and other proteins herein disclosed which have at least, 70% or 75% or 80% or 85% or 90% or 95% homology to the stated sequence. Those of skill in the art readily understand how to determine the homology of two proteins. For example, the homology can be calculated after aligning the two sequences so that the homology is at its highest level.

[0184] Another way of calculating homology can be performed by published algorithms. Optimal alignment of sequences for comparison may be conducted by the local homology algorithm of Smith and Waterman Adv. Appl. Math. 2: 482 (1981), by the homology alignment algorithm of Needleman and Wunsch, J. MoL Biol. 48: 443 (1970), by the search for similarity method of Pearson and Lipman, Proc. Natl. Acad. Sci. U.S.A. 85: 2444 (1988), by computerized implementations of these algorithms (GAP, BESTFIT, FASTA, and TFASTA in the Wisconsin Genetics Software Package, Genetics Computer Group, 575 Science Dr., Madison, Wis.), or by inspection.

[0185] The same types of homology can be obtained for nucleic acids by for example the algorithms disclosed in Zuker, M. Science 244:48-52, 1989, Jaeger et al. Proc. Natl. Acad. Sci. USA 86:7706-7710, 1989, Jaeger et al. Methods Enzymol. 183:281-306, 1989 which are herein incorporated by reference for at least material related to nucleic acid alignment.

[0186] It is understood that the description of conservative mutations and homology can be combined together in any combination, such as embodiments that have at least 70% homology to a particular sequence wherein the variants are conservative mutations.

[0187] As this specification discusses various proteins and protein sequences it is understood that the nucleic acids that can encode those protein sequences are also disclosed. This would include all degenerate sequences related to a specific protein sequence, i.e. all nucleic acids having a sequence that encodes one particular protein sequence as well as all nucleic acids, including degenerate nucleic acids, encoding the disclosed variants and derivatives of the protein sequences. Thus, while each particular nucleic acid sequence may not be written out herein, it is understood that each and every sequence is in fact disclosed and described herein through the disclosed protein sequence. It is also understood that while no amino acid sequence indicates what particular DNA sequence encodes that protein within an organism, where particular variants of a disclosed protein are disclosed herein, the known nucleic acid sequence that encodes that protein in the particular gene from which that protein arises is also known and herein disclosed and described.

[0188] It is understood that there are numerous amino acid and peptide analogs which can be incorporated into the disclosed compositions. For example, there are numerous D amino acids or amino acids which have a different functional substituent then the amino acids shown in Table AAA and Table AAS. The opposite stereo isomers of naturally occurring peptides are disclosed, as well as the stereo isomers of peptide analogs. These amino acids can readily be incorporated into polypeptide chains by charging tRNA molecules with the amino acid of choice and engineering genetic constructs that utilize, for example, amber codons, to insert the analog amino acid into a peptide chain in a site specific way (Thorson et al., Methods in Molec. Biol. 77:43-73 (1991), Zoller, Current Opinion in Biotechnology, 3:348-354 (1992); Ibba, Biotechnology & Genetic Engineering Reviews 13:197-216 (1995), Cahill et al., TIBS, 14(10):400-403 (1989); Benner, TIB Tech, 12:158-163 (1994); Ibba and Hennecke, Bio/technology, 12:678-682 (1994) all of which are herein incorporated by reference at least for material related to amino acid analogs).

[0189] Molecules can be produced that resemble peptides, but which are not connected via a natural peptide linkage. For example, linkages for amino acids or amino acid analogs can include CH₂NH—, —CH₂S—, —CH₂—CH₂—, —CH═CH— (cis and trans), —COCH₂—, —CH(OH)CH₂—, and —CHH₂SO—(These and others can be found in Spatola, A. F. in Chemistry and Biochemistry of Amino Acids, Peptides, and Proteins, B. Weinstein, eds., Marcel Dekker, New York, p. 267 (1983); Spatola, A. F., Vega Data (March 1983), Vol. 1, Issue 3, Peptide Backbone Modifications (general review); Morley, Trends Pharm Sci (1980) pp. 463-468; Hudson, D. et al., Int J Pept Prot Res 14:177-185 (1979) (—CH₂NH—, CH₂CH₂—); Spatola et al. Life Sci 38:1243-1249 (1986) (—CHH₂—S); Hann J. Chem. Soc Perkin Trans. 1307-314 (1982) (—CH—CH—, cis and trans); Almquist et al. J. Med. Chem. 23:1392-1398 (1980) (—COCH₂—); Jennings-White et al. Tetrahedron Lett 23:2533 (1982) (—COCH₂—); Szelke et al. European Appln, EP 45665 CA (1982): 97:39405 (1982) (—CH(OH)CH₂—); Holladay et al. Tetrahedron. Lett 24:4401-4404 (1983) (—C(OH)CH₂—); and Hruby Life Sci 31:189-199 (1982) (—CH₂—S—); each of which is incorporated herein by reference. A particularly preferred non-peptide linkage is —CH₂NH—. It is understood that peptide analogs can have more than one atom between the bond atoms, such as b-alanine, g-aminobutyric acid, and the like.

[0190] Amino acid analogs and analogs and peptide analogs often have enhanced or desirable properties, such as, more economical production, greater chemical stability, enhanced pharmacological properties (half-life, absorption, potency, efficacy, etc.), altered specificity (e.g., a broad-spectrum of biological activities), reduced antigenicity, and others.

[0191] D-amino acids can be used to generate more stable peptides, because D amino acids are not recognized by peptidases and such. Systematic substitution of one or more amino acids of a consensus sequence with a D-amino acid of the same type (e.g., D-lysine in place of L-lysine) can be used to generate more stable peptides. Cysteine residues can be used to cyclize or attach two or more peptides together. This can be beneficial to constrain peptides into particular conformations. (Rizo and Gierasch Ann. Rev. Biochem. 61:387 (1992), incorporated herein by reference).

[0192] 6. Antibodies

[0193] (1) Antibodies Generally

[0194] The term “antibodies” is used herein in a broad sense and includes both polyclonal and monoclonal antibodies. In addition to intact immunoglobulin molecules, also included in the term “antibodies” are fragments or polymers of those immunoglobulin molecules, and human or humanized versions of immunoglobulin molecules or fragments thereof, as long as they are chosen for their ability to interact with a specific haplotype of FVIII such that FVIII is inhibited, for example. The antibodies can be tested for their desired activity using the in vitro assays described herein, or by analogous methods, after which their in vivo therapeutic and/or prophylactic activities are tested according to known clinical testing methods.

[0195] The term “monoclonal antibody” as used herein refers to an antibody obtained from a substantially homogeneous population of antibodies, i.e., the individual antibodies within the population are identical except for possible naturally occurring mutations that may be present in a small subset of the antibody molecules. The monoclonal antibodies herein specifically include “chimeric” antibodies in which a portion of the heavy and/or light chain is identical with or homologous to corresponding sequences in antibodies derived from a particular species or belonging to a particular antibody class or subclass, while the remainder of the chain(s) is identical with or homologous to corresponding sequences in antibodies derived from another species or belonging to another antibody class or subclass, as well as fragments of such antibodies, as long as they exhibit the desired antagonistic activity (See, U.S. Pat. No. 4,816,567 and Morrison et al., Proc. Natl. Acad. Sci. USA, 81:6851-6855 (1984)).

[0196] The disclosed monoclonal antibodies can be made using any procedure which produces monoclonal antibodies. For example, disclosed monoclonal antibodies can be prepared using hybridoma methods, such as those described by Kohler and Milstein, Nature, 256:495 (1975). In a hybridoma method, a mouse or other appropriate host animal is typically immunized with an immunizing agent to elicit lymphocytes that produce or are capable of producing antibodies that will specifically bind to the immunizing agent. Alternatively, the lymphocytes may be immunized in vitro, e.g., using the HIV Env-CD4-co-receptor complexes described herein.

[0197] The monoclonal antibodies may also be made by recombinant DNA methods, such as those described in U.S. Pat. No. 4,816,567 (Cabilly et al.). DNA encoding the disclosed monoclonal antibodies can be readily isolated and sequenced using conventional procedures (e.g., by using oligonucleotide probes that are capable of binding specifically to genes encoding the heavy and light chains of murine antibodies). Libraries of antibodies or active antibody fragments can also be generated and screened using phage display techniques, e.g., as described in U.S. Pat. No. 5,804,440 to Burton et al. and U.S. Pat. No. 6,096,441 to Barbas et al.

[0198] In vitro methods are also suitable for preparing monovalent antibodies.

[0199] Digestion of antibodies to produce fragments thereof, particularly, Fab fragments, can be accomplished using routine techniques known in the art. For instance, digestion can be performed using papain. Examples of papain digestion are described in WO 94/29348 published Dec. 22, 1994 and U.S. Pat. No. 4,342,566. Papain digestion of antibodies typically produces two identical antigen binding fragments, called Fab fragments, each with a single antigen binding site, and a residual Fc fragment. Pepsin treatment yields a fragment that has two antigen combining sites and is still capable of cross-linking antigen.

[0200] The fragments, whether attached to other sequences or not, can also include insertions, deletions, substitutions, or other selected modifications of particular regions or specific amino acids residues, provided the activity of the antibody or antibody fragment is not significantly altered or impaired compared to the non-modified antibody or antibody fragment. These modifications can provide for some additional property, such as to remove/add amino acids capable of disulfide bonding, to increase its bio-longevity, to alter its secretory characteristics, etc. In any case, the antibody or antibody fragment must possess a bioactive property, such as specific binding to its cognate antigen. Functional or active regions of the antibody or antibody fragment may be identified by mutagenesis of a specific region of the protein, followed by expression and testing of the expressed polypeptide. Such methods are readily apparent to a skilled practitioner in the art and can D include site-specific mutagenesis of the nucleic acid encoding the antibody or antibody fragment. (Zoller, M. J. Curr. Opin. Biotechnol. 3:348-354, 1992).

[0201] As used herein, the term “antibody” or “antibodies” can also refer to a human antibody and/or a humanized antibody. Many non-human antibodies (e.g., those derived from mice, rats, or rabbits) are naturally antigenic in humans, and thus can give rise to undesirable immune responses when administered to humans. Therefore, the use of human or humanized antibodies in the methods serves to lessen the chance that an antibody administered to a human will evoke an undesirable immune response.

[0202] FVIII inhibitor antibody neutralizing antibodies can be administered to neutralize endogenous FVIII inhibitor antibodies.

[0203] (2) Human Antibodies

[0204] The disclosed human antibodies can be prepared using any technique. Examples of techniques for human monoclonal antibody production include those described by Cole et al. (Monoclonal Antibodies and Cancer Therapy, Alan R. Liss, p. 77, 1985) and by Boerner et al. (J. Imnmunol., 147(1):86-95, 1991). Human antibodies (and fragments thereof) can also be produced using phage display libraries (Hoogenboom et al., J. Mol. Biol., 227:381, 1991; Marks et al., J. Mol. Biol., 222:581, 1991).

[0205] The disclosed human antibodies can also be obtained from transgenic animals. For example, transgenic, mutant mice that are capable of producing a full repertoire of human antibodies, in response to immunization, have been described (see, e.g., Jakobovits et al., Proc. Natl. Acad. Sci. USA, 90:2551-255 (1993); Jakobovits et al., Nature, 362:255-258 (1993); Bruggermann et al., Year in Immunol., 7:33 (1993)). Specifically, the homozygous deletion of the antibody heavy chain joining region (J(H)) gene in these chimeric and germ-line mutant mice results in complete inhibition of endogenous antibody production, and the successful transfer of the human germ-line antibody gene array into such germ-line mutant mice results in the production of human antibodies upon antigen challenge. Antibodies having the desired activity are selected using Env-CD4-co-receptor complexes as described herein.

[0206] (3) Humanized Antibodies

[0207] Antibody humanization techniques generally involve the use of recombinant DNA technology to manipulate the DNA sequence encoding one or more polypeptide chains of an antibody molecule. Accordingly, a humanized form of a non-human antibody (or a fragment thereof) is a chimeric antibody or antibody chain (or a fragment thereof, such as an Fv, Fab, Fab, or other antigen-binding portion of an antibody) which contains a portion of an antigen binding site from a non-human (donor) antibody integrated into the framework of a human (recipient) antibody.

[0208] To generate a humanized antibody, residues from one or more complementarity determining regions (CDRs) of a recipient (human) antibody molecule are replaced by residues from one or more CDRs of a donor (non-human) antibody molecule that is known to have desired antigen binding characteristics (e.g., a certain level of specificity and affinity for the target antigen). In some instances, Fv framework (FR) residues of the human antibody are replaced by corresponding non-human residues. Humanized antibodies may also contain residues which are found neither in the recipient antibody nor in the imported CDR or framework sequences. Generally, a humanized antibody has one or more amino acid residues introduced into it from a source which is non-human. In practice, humanized antibodies are typically human antibodies in which some CDR residues and possibly some FR residues are substituted by residues from analogous sites in rodent antibodies. Humanized antibodies generally contain at least a portion of an antibody constant region (Fc), typically that of a human antibody (Jones et al., Nature, 321:522-525 (1986), Reichmann et al., Nature, 332:323-327 (1988), and Presta, Curr. Opin. Struct. Biol., 2:593-596 (1992)).

[0209] Methods for humanizing non-human antibodies are well known in the art. For example, humanized antibodies can be generated according to the methods of Winter and co-workers (Jones et al., Nature, 321:522-525 (1986), Riechmann et al., Nature, 332:323-327 (1988), Verhoeyen et al., Science, 239:1534-1536 (1988)), by substituting rodent CDRs or CDR sequences for the corresponding sequences of a human antibody. Methods that can be used to produce humanized antibodies are also described in U.S. Pat. No. 4,816,567 (Cabilly et al.), U.S. Pat. No. 5,565,332 (Hoogenboom et al.), U.S. Pat. No. 5,721,367 (Kay et al.), U.S. Pat. No. 5,837,243 (Deo et al.), U.S. Pat. No. 5,939,598 (Kucherlapati et al.), U.S. Pat. No. 6,130,364 (Jakobovits et al.), and U.S. Pat. No. 6,180,377 (Morgan et al.).

[0210] (4) Administration of Antibodies

[0211] Administration of the antibodies can be done as disclosed herein. Nucleic acid approaches for antibody delivery also exist. FVIII inhibitor antibody neutralizing antibodies and antibody fragments can also be administered to patients or subjects as a nucleic acid preparation (e.g., DNA or RNA) that encodes the antibody or antibody fragment, such that the patient's or subject's own cells take up the nucleic acid and produce and secrete the encoded antibody or antibody fragment. The delivery of the nucleic acid can be by any means, as disclosed herein, for example.

[0212] 7. Pharmaceutical Carriers/Delivery of Pharmaceutical Products

[0213] As described above, the compositions can also be administered in vivo in a pharmaceutically acceptable carrier. By “pharmaceutically acceptable” is meant a material that is not biologically or otherwise undesirable, i.e., the material may be administered to a subject, along with the nucleic acid or vector, without causing any undesirable biological effects or interacting in a deleterious manner with any of the other components of the pharmaceutical composition in which it is contained. The carrier would naturally be selected to minimize any degradation of the active ingredient and to minimize any adverse side effects in the subject, as would be well known to one of skill in the art.

[0214] The compositions may be administered orally, parenterally (e.g., intravenously), by intramuscular injection, by intraperitoneal injection, transdermally, extracorporeally, topically or the like, including topical intranasal administration or administration by inhalant. As used herein, “topical intranasal administration” means delivery of the compositions into the nose and nasal passages through one or both of the nares and can comprise delivery by a spraying mechanism or droplet mechanism, or through aerosolization of the nucleic acid or vector. Administration of the compositions by inhalant can be through the nose or mouth via delivery by a spraying or droplet mechanism. Delivery can also be directly to any area of the respiratory system (e.g., lungs) via intubation. The exact amount of the compositions required will vary from subject to subject, depending on the species, age, weight and general condition of the subject, the severity of the allergic disorder being treated, the particular nucleic acid or vector used, its mode of administration and the like. Thus, it is not possible to specify an exact amount for every composition. However, an appropriate amount can be determined by one of ordinary skill in the art using only routine experimentation given the teachings herein.

[0215] Parenteral administration of the composition, if used, is generally characterized by injection. Injectables can be prepared in conventional forms, either as liquid solutions or suspensions, solid forms suitable for solution of suspension in liquid prior to injection, or as emulsions. A more recently revised approach for parenteral administration involves use of a slow release or sustained release system such that a constant dosage is maintained. See, e.g., U.S. Pat. No. 3,610,795, which is incorporated by reference herein.

[0216] The materials may be in solution, suspension (for example, incorporated into microparticles, liposomes, or cells). These may be targeted to a particular cell type via antibodies, receptors, or receptor ligands. The following references are examples of the use of this technology to target specific proteins to tumor tissue (Senter, et al., Bioconjugate Chem., 2:447-451, (1991); Bagshawe, K. D., Br. J. Cancer, 60:275-281, (1989); Bagshawe, et al., Br. J. Cancer, 58:700-703, (1988); Senter, et al., Bioconjugate Chem., 4:3-9, (1993); Battelli, et al., Cancer Immunol. Immunother., 35:421-425, (1992); Pietersz and McKenzie, Immunolog. Reviews, 129:57-80, (1992); and Roffler, et al., Biochem. Pharmacol, 42:2062-2065, (1991)). Vehicles such as “stealth” and other antibody conjugated liposomes (including lipid mediated drug targeting to colonic carcinoma), receptor mediated targeting of DNA through cell specific ligands, lymphocyte directed tumor targeting, and highly specific therapeutic retroviral targeting of murine glioma cells in vivo. The following references are examples of the use of this technology to target specific proteins to tumor tissue (Hughes et al., Cancer Research, 49:6214-6220, (1989); and Litzinger and Huang, Biochimica et Biophysica Acta, 1104:179-187, (1992)). In general, receptors are involved in pathways of endocytosis, either constitutive or ligand induced. These receptors cluster in clathrin-coated pits, enter the cell via clathrin-coated vesicles, pass through an acidified endosome in which the receptors are sorted, and then either recycle to the cell surface, become stored intracellularly, or are degraded in lysosomes. The internalization pathways serve a variety of functions, such as nutrient uptake, removal of activated proteins, clearance of macromolecules, opportunistic entry of viruses and toxins, dissociation and degradation of ligand, and receptor-level regulation. Many receptors follow more than one intracellular pathway, depending on the cell type, receptor concentration, type of ligand, ligand valency, and ligand concentration. Molecular and cellular mechanisms of receptor-mediated endocytosis has been reviewed (Brown and Greene, DNA and Cell Biology 10:6, 399-409 (1991)).

[0217] a) Pharmaceutically Acceptable Carriers

[0218] The compositions, including antibodies, can be used therapeutically in combination with a pharmaceutically acceptable carrier.

[0219] Suitable carriers and their formulations are described in Remington: The Science and Practice of Pharmacy (19th ed.) ed. A. R. Gennaro, Mack Publishing Company, Easton, Pa. 1995. Typically, an appropriate amount of a pharmaceutically-acceptable salt is used in the formulation to render the formulation isotonic. Examples of the pharmaceutically-acceptable carrier include, but are not limited to, saline, Ringer's solution and dextrose solution. The pH of the solution is preferably from about 5 to about 8, and more preferably from about 7 to about 7.5. Further carriers include sustained release preparations such as semipermeable matrices of solid hydrophobic polymers containing the antibody, which matrices are in the form of shaped articles, e.g., films, liposomes or microparticles. It will be apparent to those persons skilled in the art that certain carriers may be more preferable depending upon, for instance, the route of administration and concentration of composition being administered.

[0220] Pharmaceutical carriers are known to those skilled in the art. These most typically would be standard carriers for administration of drugs to humans, including solutions such as sterile water, saline, and buffered solutions at physiological pH. The compositions can be administered intramuscularly or subcutaneously. Other compounds will be administered according to standard procedures used by those skilled in the art.

[0221] Pharmaceutical compositions may include carriers, thickeners, diluents, buffers, preservatives, surface active agents and the like in addition to the molecule of choice. Pharmaceutical compositions may also include one or more active ingredients such as antimicrobial agents, antiinflammatory agents, anesthetics, and the like.

[0222] The pharmaceutical composition may be administered in a number of ways depending on whether local or systemic treatment is desired, and on the area to be treated. Administration may be parenterally, for example by intravenous drip, subcutaneous, intraperitoneal or intramuscular injection. The disclosed antibodies can be administered intravenously, intraperitoneally, intramuscularly, subcutaneouslyor intracavity.

[0223] Preparations for parenteral administration include sterile aqueous or non-aqueous solutions, suspensions, and emulsions. Examples of non-aqueous solvents are propylene glycol, polyethylene glycol, vegetable oils such as olive oil, and injectable organic esters such as ethyl oleate. Aqueous carriers include water, alcoholic/aqueous solutions, emulsions or suspensions, including saline and buffered media. Parenteral vehicles include sodium chloride solution, Ringer's dextrose, dextrose and sodium chloride, lactated Ringer's, or fixed oils. Intravenous vehicles include fluid and nutrient replenishers, electrolyte replenishers (such as those based on Ringer's dextrose), and the like. Preservatives and other additives may also be present such as, for example, antimicrobials, anti-oxidants, chelating agents, and inert gases and the like.

[0224] Some of the compositions may potentially be administered as a pharmaceutically acceptable acid- or base-addition salt, formed by reaction with inorganic acids such as hydrochloric acid, hydrobromic acid, perchloric acid, nitric acid, thiocyanic acid, sulfuric acid, and phosphoric acid, and organic acids such as formic acid, acetic acid, propionic acid, glycolic acid, lactic acid, pyruvic acid, oxalic acid, malonic acid, succinic acid, maleic acid, and fumaric acid, or by reaction with an inorganic base such as sodium hydroxide, ammonium hydroxide, potassium hydroxide, and organic bases such as mono-, di-, trialkyl and aryl amines and substituted ethanolamines.

[0225] 8. Chips and Micro Arrays

[0226] Disclosed are chips where at least one address is the sequences or part of the sequences set forth in any of the nucleic acid sequences disclosed herein. Also disclosed are chips where at least one address is the sequences or portion of sequences set forth in any of the peptide sequences disclosed herein.

[0227] Also disclosed are chips where at least one address is a variant of the sequences or part of the sequences set forth in any of the nucleic acid sequences disclosed herein. Also disclosed are chips where at least one address is a variant of the sequences or portion of sequences set forth in any of the peptide sequences disclosed herein.

[0228] 9. Computer Readable Mediums

[0229] It is understood that the disclosed nucleic acids and proteins can be represented as a sequence consisting of the nucleotides of amino acids. There are a variety of ways to display these sequences, for example the nucleotide guanosine can be represented by G or g. Likewise the amino acid valine can be represented by Val or V. Those of skill in the art understand how to display and express any nucleic acid or protein sequence in any of the variety of ways that exist, each of which is considered herein disclosed. Specifically contemplated herein is the display of these sequences on computer readable mediums, such as, commercially available floppy disks, tapes, chips, hard drives, compact disks, and video disks, or other computer readable mediums. Also disclosed are the binary code representations of the disclosed sequences. Those of skill in the art understand what computer readable mediums. Thus, computer readable mediums on which the nucleic acids or protein sequences are recorded, stored, or saved.

[0230] Disclosed are computer readable mediums comprising the sequences and information regarding the sequences set forth herein. Various computational methods can be implemented to determine the haplotype of a sequence. Disclosed herein are computational methods for determining whether a sequence is H1, H2, H3, H4, H5, or H6. Current sequencing technology can determine haplotypes with tedious and costly experiments. Such restriction makes in silico haplotyping attractive. Many inference and statistical methods have been proposed for haplotyping, such as Clark method (Clark, A. G. (1990) Inference of haplotypes from PCR-amplified samples of diploid populations. Molecular Biology and Evolution, 7, 111-122.), parsimony approaches (Gusfield, D. (2001) Inference of haplotypes from samples of diploid populations: Complexity and algorithms. Journal of Computational Biology, 8, 305-324; Lancia, G., Bafna, V., Istrail, S., Lippert, R. and R. Schwartz. (2001) SNPs problems, complexity and algorithms. In Proceedings of Annual European Symposium on Algorithms (ESA), 2161, Lecture Notes in Computer Science, 182-193, Springer; Wang, R., Wu, L., Li, Z., Zhang, X. (2005) Haplotype Reconstruction from SNP Fragments by Minimum Error Correction. Bioinformatics, 21, 2456-2462.), maximum-likelihood methods (Excoffier, L. and Slatkin, M. (1995) Maximum-likelihood estimation of molecular haplotype frequencies in a diploid population. Mol. Biol. Evol., 12, 921-927; Hawley, M. and Kidd, K. (1995) Haplo: a program using the EM algorithm to estimate the frequencies of multi-site haplotypes. J. Heredity, 86, 409-411.), phylogeny-based approaches (Gusfield, D. (2002) Haplotyping as perfect phylogeny: Conceptual framework and efficient solutions. Proceedings of RECOMB 2002: The sixth Annual International Conference on Computational Biology, 166-175.; Chung, R. H. and Gusfield, D. (2003) Perfect phylogeny haplotyper: Haplotype inferral using a tree model. Bioinformatics, 19, 780-781.; Halperin, E. and Eskin, E. (2004) Haplotype reconstruction from genotype data using imperfect phylogeny. Bioinformatics, 20, 1842-1849.), and Bayesian methods (Stephens, M., Smith, N.J. and Donnelly, P. (2001) A new statistical method for haplotype reconstruction from population data. American Journal of Human Genetics, 68, 978-989; Niu, T., Quin, Z. S, Xu, X. and Liu, J. S. (2002) Bayesian haplotype inference for multiple linked single-nucleotide polymorphisms. American Journal of Human Genetics, 70, 157-169). In particular, the parsimony criterion that seeks the minimum number of haplotypes to explain a given set of genotypes, has been widely investigated due to its intuitive simplicity and biological implication. Recently both Wang et al. (Wang, L. S. and Xu, Y. (2003) Haplotype inference by maximum parsimony. Bioinformatics, 19, 1773-1780) and Brown et al. (Wang, L. S. and Xu, Y. (2003) Haplotype inference by maximum parsimony. Bioinformatics, 19, 1773-1780.) developed an exact algorithm to solve the haplotype inference problem based on the parsimony condition, by the branch-and-bound method and by integer programming method respectively. However, the pure parsimony haplotype inference problem is NP-hard (Gusfield, D. (2001) Inference of haplotypes from samples of diploid populations: Complexity and algorithms. Journal of Computational Biology, 8, 305-324).

[0231] 10. Kits

[0232] Disclosed herein are kits that are drawn to reagents that can be used in practicing the methods disclosed herein. The kits can include any reagent or combination of reagent discussed herein or that would be understood to be required or beneficial in the practice of the disclosed methods. For example, the kits could include primers to perform the amplification reactions discussed in certain embodiments of the methods, as well as the buffers and enzymes required to use the primers as intended. For example, disclosed is a kit for determining a subject's FVIII haplotype, comprising the oligonucleotides described herein.

[0233] 11. Blood Plasma Products

[0234] Human blood plasma is the yellow, protein-rich fluid that suspends the cellular components of whole blood, that is, the red blood cells, white blood cells and platelets. Plasma enables many housekeeping and other specialized bodily functions. In blood plasma, the most prevalent protein is albumin, approximately 32 to 35 grams per liter, which helps to maintain osmotic balance of the blood.

[0235] Blood plasma is generally accumulated in two ways: plasma separated from donor collected whole blood, and from donated plasma, a process where whole blood is drawn from a donor, the plasma is separated (Plasmapheresis) and then the remainder, less the plasma, is returned to the donor. The human body completely replaces the lost plasma in a matter of days. FVIII products that are from plasma obtained through Plasmapheresis are said to be derived from source plasma. FVIII products that are from plasma obtained originally from whole blood units (via whole blood donation), are said to be derived from salvage or recovered plasma.

[0236] Blood plasma, once separated from the other components of whole blood, can be further separated into a number of blood plasma products. The process by which plasma is separated into some of its different component parts is known as fractionation. Plasma-derived products are manufactured from batches of blood plasma collected from many thousands of blood donors. The processing of one pooled lot of plasma can take up to six months and, because of concerns about infectious agents, by rule, the process begins with a 90-day quarantine period. Unlike cellular blood components, blood products derived from plasma can be treated with chemicals, heat, ultraviolet radiation or filtration to decrease cost and to increase ease of handling and distribution, and to increase the safety of the blood supply. Each of these methods has some drawbacks: they may leave unsafe levels of some viruses, be very costly, and/or damage the blood or blood plasma.

[0237] Quantified and defined by volume, albumin continues to be the main product of the blood plasma fractionation industry. Though there are many uses, its principal use is in restoring blood volume in a wide variety of critical care settings.

[0238] Rather than using whole blood transfusions, individual blood components such as red cells, white cells, platelets, and plasma are increasingly being used. Plasma is fractionated into an increasing number of blood plasma products, including albumin, gamma globulins, blood-typing sera, clotting factors (such as FVIII) for people with hemophilia, and more.

[0239] Immunoglobins constitute an important class of blood plasma products. This is a group of antibodies made by the body as part of its immune response “team.” These products generally confer immediate, though temporary, protection either from a specific agent, such as rabies virus or snake venom, or arising from a non-specific threat such as in cases where an individual's immune system is weakened due to serious illness or medical treatment which may have an adverse effect on the patient.

[0240] Two main groups of immunoglobins are produced intravenous Immunoglobin (IVIG)—A highly heterogeneous product that can provide generalized immunity by relying on the inherent variation among individuals and the variety of immune-provoking agents to which they have been exposed over their lifetimes. IVIG is made from plasma collected and pooled from thousands of donors. hyperimmunes—Specific immunoglobins isolated and purified from selected donors who have strong immunity to a selected agent. For example, individuals who have been exposed to rabies vaccine can develop high levels of antibodies to the virus. Immunoglobins prepared from such plasma can be used as a first treatment when a person has been bitten by a suspected rabid animal.

[0241] The best known of the blood plasma products are the blood clotting factors, necessary for the wellbeing of those with hemophilia. These can be derived from donated blood plasma and administered to individuals who are genetically unable to produce all of the components necessary for blood clotting. The most commonly known need is for Factor VIII.

[0242] This pooling of donated blood plasma is made necessary by a new technique that substantially reduces costs and potentially facilitates an easier purifying of the plasma product. The “detergent cleansing” process is not cost effective in small batches.

[0243] The New York Blood Center developed this solvent-detergent technology, cleansers that dissolve the fatty coating of viruses such as some HIV, hepatitis B and hepatitis C, some of the so-called lipid-enveloped viruses. It then washes them out of the treated batch.

[0244] This process has been used in drugs made from blood plasma, such as immune globulin or hemophiliacs' clotting factor.

[0245] Plasma pooling facilitates the treatment, for purposes of economies of scale, handling, distribution and blood safety, of collected blood plasma. This collected and aggregated blood plasma is placed in a common vat for this process. The process, produces what is known as Solvent Detergent Blood Plasma (SD plasma, PLAS+SD). SD blood plasma is a blood product that has undergone treatment with the solvent tri-N-butyl phosphate (TNBP) and the detergent Triton X-100 to destroy any lipid bound viruses including: HIV1 and 2, HCV, HBV and HTLVI and II. The process does not destroy non-enveloped viruses such as parvovirus, hepatitis A virus, or any of the prion particles. The SD process includes the pooling of up to 500,000 units of thawed Fresh Frozen Blood Plasma (FFP), treating it with the solvent and detergent. The treated blood plasma pool is then sterile filtered (and thus leukocyte-reduced) before being repackaged into 200 mL aliquots or bags and re-frozen. This separation into smaller units is to facilitate handling, distribution and use by the transfusion recipient or the blood product reprocessor. SD Blood plasma can be stored for up to one year frozen at −18° C. When ordered for transfusion it is thawed in a water bath to a use temperature of 37° C., which takes approximately 25 to 30 minutes and can be kept refrigerated for up to 24 hours at 10 to 60 centigrade. Only ABO identical or compatible SD Blood plasma can be transfused.

[0246] Factor VIII concentrates are a commercially prepared, lyophilized powder purified from human plasma to treat patients with hemostatic disorders such as, hemophilia A or von Willebrand's disease. Alternatively, recombinant (synthetic) protein is purified from genetically engineered non-human cells grown in tissue culture. One factor VIII concentrate unit equals the clotting activity in 1 ml of fresh plasma. Factor VIII concentrate is cell free and is administered without regard to patient or donor ABO or Rh type. It is heat treated and/or solvent detergent treated to reduce the risk of virus transmission. Current processes have eliminated the risk of HIV, HBV and HCV transmission. Concentrates differ in the purification procedures. Highly purified factor VIII, e.g., preparations purified over a monoclonal antibody column or current recombinant factor VIII concentrates, are stabilized by adding 98% of pasteurized human albumin. Porcine factor VIII concentrate is available for patients with high titer anti-human factor VIII ‘allo’ or autoantibody inhibitors. Factor VIII concentrates are stored refrigerated at 350 to 450 Fahrenheit for up to two years from the date of manufacture. Some preparations may be kept at room temperature for extended periods. Factor VIII concentrate should be infused within four hours of preparation to reduce the risk of bacterial growth. Vials are usually shipped to a hospital pharmacy, Blood service or nursing unit and mixed there prior to use. Many patients or families receive them directly for home care. Methods for purifying FVIII complex from an impure protein fraction are disclosed in U.S. Pat. No. 5,659,017, incorporated herein by reference.

[0247] Factor VIII concentrate is indicated for the treatment of bleeding or imminent invasive procedures in patients with hemophilia A, (congenital factor VIII deficiency) and for patients with low titer factor VIII inhibitors. Regular prophylactic doses are often used, as well as daily doses in some hemophilic inhibitor patients to try to induce immune tolerance. Patients with von Willebrand's disease respond to one specific, pasteurized intermediate purity concentrate in which that factor activity is relatively preserved.

[0248] Dosage is dependent on the nature of the injury, the degree of factor deficiency, the weight of the patient and the presence and level or absence of factor VIII inhibitors. The half life of circulating factor VIII is eight to twelve hours, therefore transfusions may need to be repeated every 12 to 24 hours to maintain hemostatic levels. Following surgery, it is necessary to maintain hemostatic levels for up to two weeks to prevent delayed bleeding and promote wound healing in the hemophilic patient.

[0249] Herein described are any combination and permutation of haplotypes together such as H1 with any combination of H2-H3-H4-H5-H6, H2 with any combination of H1-H3-H4-H5-H6, H3 with any combination of H1-H2-H4-H5-H6, H4 with any combination of H1-H2-H3-H5-H6, H5 with any combination of H1-H2-H3-H5-H6, and H6 with any combination of H1-H2-H3-H4-H5. For example, combinations can include, but are not limited to, H1-H2, H1-H2-H3, H1-H2-H3-H4, H1-H2-H3-H4-H5, H1-H2-H3-H4-H5-H6, H2-H3, H2-H3-H4, H2-H3-H4-H5, H2-H3-H4-H5-H6, H3-H4, H3-H4-H5, H3-H4-H5-H6, H4-H5, H4-H5-H6, H5-H6, H1-H3, H1-H4, H1-H5, H2-H4, H2-H5, H2-H6, H3-H5, H3-H6, H4-H6, and the like.

[0250] This applies to individuals/subjects that may be heterozygous and have any combination of haplotypes or wherein pooled blood products can comprise any of the described combinations and permutations.

### D. METHODS OF MAKING THE COMPOSITIONS

[0251] The compositions disclosed herein and the compositions necessary to perform the disclosed methods can be made using any method known to those of skill in the art for that particular reagent or compound unless otherwise specifically noted.

[0252] Recombinant factor VIII can be produced through the use of eukaryotic protein expression systems. In general, a eukaryotic cell line, which is deficient in a required gene, is transformed with a vector comprising the gene that it has a deficiency for, and the recombinant DNA which one wishes to express. Transformation can be accomplished by techniques such as electroporation or viral delivery. The cell line chosen to produce the protein is selected to be compatible with the protein of interest, capable of continuously expressing the protein of interests, capable of growing on a medium which facilitates purification of the protein of interest, along with other factors known to those skilled in the art. Examples of such techniques are disclosed in European Patent Application 0 302 968 A2 and U.S. Pat. No. 5,149,637 both of which are incorporated by reference in their entirety.

[0253] The recombinant factor VIII molecules can be tested in humans for their reduced antigenicity and/or immunogenicity in at least two types of clinical trials. In one type of trial, designed to determine whether the recombinant or recombinant hybrid factor VIII is immunoreactive with inhibitory antibodies, recombinant or recombinant hybrid factor VIII is administered, preferably by intravenous infusion, to approximately 25 patients having factor VIII deficiency who have antibodies to factor VIII that inhibit the coagulant activity of therapeutic human or porcine factor VIII. The dosage of the recombinant or recombinant hybrid factor VIII is in a range between 5 and 50 Units/kg body weight, preferably 10-50 Units/kg, and most preferably 40 Units/kg body weight. Approximately 1 hour after each administration, the recovery of factor VIII from blood samples is measured in a one-stage coagulation assay. Samples are taken again approximately 5 hours after infusion, and recovery is measured. Total recovery and the rate of disappearance of factor VIII from the samples is predictive of the antibody titer and inhibitory activity. If the antibody titer is high, factor VIII recovery usually cannot be measured. The recovery results are compared to the recovery of recovery results in patients treated with plasma-derived human factor VIII, recombinant human factor VIII, porcine factor VIII, and other commonly used therapeutic forms of factor VIII or factor VIII substitutes.

[0254] In a second type of clinical trial, designed to determine whether the recombinant or recombinant hybrid factor VIII is immunogenic, i.e., whether patients will develop inhibitory antibodies, recombinant or recombinant hybrid factor VIII is administered, as described in the preceding paragraph, to approximately 100 previously untreated hemophiliac patients who have not developed antibodies to factor VIII. Treatments are given approximately every 2 weeks over a period of 6 months to 1 year. At 1 to 3 month intervals during this period, blood samples are drawn and Bethesda assays or other antibody assays are performed to determine the presence of inhibitory antibodies. Recovery assays can also be done, after each infusion. Results are compared to hemophiliac patients who receive plasma-derived human factor VIII, recombinant human factor VIII, porcine factor VIII, or other commonly used therapeutic forms of factor VIII or factor VIII substitutes.

[0255] 1. Nucleic acid synthesis

[0256] For example, the nucleic acids, such as, the oligonucleotides to be used as primers can be made using standard chemical synthesis methods or can be produced using enzymatic methods or any other known method. Such methods can range from standard enzymatic digestion followed by nucleotide fragment isolation (see for example, Sambrook et al., Molecular Cloning: A Laboratory Manual, 2nd Edition (Cold Spring Harbor Laboratory Press, Cold Spring Harbor, N.Y., 1989) Chapters 5, 6) to purely synthetic methods, for example, by the cyanoethyl phosphoramidite method using a Milligen or Beckman System 1Plus DNA synthesizer (for example, Model 8700 automated synthesizer of Milligen-Biosearch, Burlington, Mass. or ABI Model 380B). Synthetic methods useful for making oligonucleotides are also described by Ikuta et al., Ann. Rev. Biochem. 53:323-356 (1984), (phosphotriester and phosphite-triester methods), and Narang et al., Methods Enzymol., 65:610-620 (1980), (phosphotriester method). Protein nucleic acid molecules can be made using known methods such as those described by Nielsen et al., Bioconjug. Chem. 5:3-7 (1994).

[0257] 2. Peptide Synthesis

[0258] One method of producing the disclosed proteins, such as SEQ ID NO: 19, is to link two or more peptides or polypeptides together by protein chemistry techniques. For example, peptides or polypeptides can be chemically synthesized using currently available laboratory equipment using either Fmoc (9-fluorenylmethyloxycarbonyl) or Boc (tert-butyloxycarbonoyl) chemistry. (Applied Biosystems, Inc., Foster City, Calif.). One skilled in the art can readily appreciate that a peptide or polypeptide corresponding to the disclosed proteins, for example, can be synthesized by standard chemical reactions. For example, a peptide or polypeptide can be synthesized and not cleaved from its synthesis resin whereas the other fragment of a peptide or protein can be synthesized and subsequently cleaved from the resin, thereby exposing a terminal group which is functionally blocked on the other fragment. By peptide condensation reactions, these two fragments can be covalently joined via a peptide bond at their carboxyl and amino termini, respectively, to form an antibody, or fragment thereof. (Grant G A (1992) Synthetic Peptides: A User Guide. W.H. Freeman and Co., N.Y. (1992); Bodansky M and Trost B., Ed. (1993) Principles of Peptide Synthesis. Springer-Verlag Inc., NY (which is herein incorporated by reference at least for material related to peptide synthesis). Alternatively, the peptide or polypeptide is independently synthesized in vivo as described herein. Once isolated, these independent peptides or polypeptides may be linked to form a peptide or fragment thereof via similar peptide condensation reactions.

[0259] For example, enzymatic ligation of cloned or synthetic peptide segments allow relatively short peptide fragments to be joined to produce larger peptide fragments, polypeptides or whole protein domains (Abrahmsen L et al., Biochemistry, 30:4151 (1991)). Alternatively, native chemical ligation of synthetic peptides can be utilized to synthetically construct large peptides or polypeptides from shorter peptide fragments. This method consists of a two step chemical reaction (Dawson et al. Synthesis of Proteins by Native Chemical Ligation. Science, 266:776-779 (1994)). The first step is the chemoselective reaction of an unprotected synthetic peptide-thioester with another unprotected peptide segment containing an amino-terminal Cys residue to give a thioester-linked intermediate as the initial covalent product. Without a change in the reaction conditions, this intermediate undergoes spontaneous, rapid intramolecular reaction to form a native peptide bond at the ligation site (Baggiolini M et al. (1992) FEBS Lett. 307:97-101; Clark-Lewis I et al., J. Biol. Chem., 269:16075 (1994); Clark-Lewis I et al., Biochemistry, 30:3128 (1991); Rajarathnam K et al., Biochemistry 33:6623-30 (1994)).

[0260] Alternatively, unprotected peptide segments are chemically linked where the bond formed between the peptide segments as a result of the chemical ligation is an unnatural (non-peptide) bond (Schnolzer, M et al. Science, 256:221 (1992)). This technique has been used to synthesize analogs of protein domains as well as large amounts of relatively pure proteins with full biological activity (deLisle Milton R C et al., Techniques in Protein Chemistry IV. Academic Press, New York, pp. 257-267 (1992)).

[0261] 3. Process or Making the Compositions

[0262] Disclosed are processes for making the compositions as well as making the intermediates leading to the compositions There are a variety of methods that can be used for making these compositions, such as synthetic chemical methods and standard molecular biology methods. It is understood that the methods of making these and the other disclosed compositions are specifically disclosed.

[0263] Disclosed are nucleic acid molecules produced by the process comprising linking in an operative way a nucleic acid comprising the sequences set forth herein and a sequence controlling the expression of the nucleic acid.

[0264] Also disclosed are nucleic acid molecules produced by the process comprising linking in an operative way a nucleic acid molecule comprising a sequence having 80% identity to a sequence set forth in herein, and a sequence controlling the expression of the nucleic acid.

[0265] Disclosed are nucleic acid molecules produced by the process comprising linking in an operative way a nucleic acid molecule comprising a sequence that hybridizes under stringent hybridization conditions to a sequence set forth herein and a sequence controlling the expression of the nucleic acid.

[0266] Disclosed are nucleic acid molecules produced by the process comprising linking in an operative way a nucleic acid molecule comprising a sequence encoding a peptide set forth herein and a sequence controlling an expression of the nucleic acid molecule.

[0267] Disclosed are cells produced by the process of transforming the cell with any of the disclosed nucleic acids. Disclosed are cells produced by the process of transforming the cell with any of the non-naturally occurring disclosed nucleic acids.

[0268] Disclosed are any of the disclosed peptides produced by the process of expressing any of the disclosed nucleic acids. Disclosed are any of the non-naturally occurring disclosed peptides produced by the process of expressing any of the disclosed nucleic acids. Disclosed are any of the disclosed peptides produced by the process of expressing any of the non-naturally disclosed nucleic acids.

[0269] Disclosed are animals produced by the process of transfecting a cell within the animal with any of the nucleic acid molecules disclosed herein. Disclosed are animals produced by the process of transfecting a cell within the animal any of the nucleic acid molecules disclosed herein, wherein the animal is a mammal. Also disclosed are animals produced by the process of transfecting a cell within the animal any of the nucleic acid molecules disclosed herein, wherein the mammal is mouse, rat, rabbit, cow, sheep, pig, or primate.

[0270] Also disclosed are animals produced by the process of adding to the animal any of the sequences disclosed herein.

### E. METHODS OF USING THE COMPOSITIONS

[0271] In one embodiment, provided are common allelic variants (e.g. haplotypes) of the human factor (F)VIII protein as pharmacogenetic determinants that modulate the immunogenicity of wildtype (wt) FVIII replacement proteins, the risk of FVIII inhibitor development and the clinical efficacy of transfusion- and gene-delivery-based coagulation factor replacement therapies.

[0272] In another embodiment, provided are common allelic variants (e.g. haplotypes) of the human factor (F)VlII protein as pharmacogenetic determinants that modulate thrombosis susceptibility. FIG. 6 is a schematic representation of common non-hemophilic F8 nsSNPs indicative of thrombosis susceptibility.

[0273] Disclosed herein are methods capable of determining the FVIII haplotype of an individual with a hemostasis disorder where the hemostasis disorder is thrombophilia (both congenital and acquired).

[0274] In a specific embodiment, provided is a haplotype specific Bethesda assay that overcomes the inherent limitations of the common Bethesda assay (i.e., near the cutoff point for this assay, under the conditions in which it is presently performed [with pooled normal plasma, which by definition would represent mostly Caucasian donors and therefore mostly haplotype 1 wildtype form of the human FVIII protein], this assay is known to have both a poor specificity [yields false-positives] and a poor sensitivity [yields false-negatives]) as it is used presently. Provided are methods for making normal plasmas that have only one each of the 6 wildtype forms of the human FVIII protein, so as to minimize the problems associated with false-negatives and false-positives, and to rid any uncertainty about what is the precise make-up of the plasma being used.

[0275] In one example, a haplotype-specific ELISA assay that is very similar in principle to the haplotype-specific Bethesda assay, but can detect all antibodies that bind to the different forms of the wildtype FVIII protein, (including those that are functionally neutralizing antibodies called inhibitors and those antibodies that are non-inhibitory [i.e., those that do not inhibit FVIII's function in a clotting assay]), is provided.

[0276] Also provided are kits for genotyping a subset of functional FVIII polymorphisms that influence either the circulating levels of FVIII protein or activity, and thereby could aid in more accurate diagnostic risk assessments for the subjects at highest risk for developing venous and/or arterial thrombotic disorders, such as stroke and myocardial infarction. For example, this can apply to the D1241E haplotype, since females who are carrying two copies of the E-allele will have an ˜25% lower FVIII level than those carrying two major copies of the D-allele and can have an elevated FVIII level.

[0277] Also provided are monoclonal antibody-based assays to rapidly “type” the different haplotypic (allelic) forms of the wildtype FVIII protein directly in samples of plasma from patient (in comparison to the DNA-based genotyping assays).

[0278] Also provided herein are biological materials, diagnostic materials, and therapeutic materials.

[0279] Disclosed is a method of categorizing a haplotype in a FVIII gene comprising, amplifying regions of the FVIII gene, determining a haplotype of the FVIII gene from DNA sequence within the amplified regions, and categorizing the haplotype as being an H1 (SEQ ID NO: 1), H2 (SEQ ID NO: 2), H3 (SEQ ID NO: 3), H4 (SEQ ID NO: 4), H5 (SEQ ID NO: 5), or H6 (SEQ ID NO: 6).

[0280] Disclosed is a method of categorizing a haplotype in a FVIII gene comprising, detecting a FVIII protein and categorizing the haplotype of the FVIII gene encoding the detected FVIII protein as being an H1 (SEQ ID NO: 1), H2 (SEQ ID NO: 2), H3 (SEQ ID NO: 3), H4 (SEQ ID NO: 4), H5 (SEQ ID NO: 5), or H6 (SEQ ID NO: 6).

[0281] Disclosed is a method of reducing the generation of anti-FVIII antibodies that inhibit or impair FVIII treatment comprising, detecting a haplotype in a FVIII gene in a subject, matching a replacement FVIII therapy to the detected haplotype, and administering the matched replacement FVIII therapy to the subject. The haplotype can be H1 (SEQ ID NO: 1), H2 (SEQ ID NO: 2), H3 (SEQ ID NO: 3), H4 (SEQ ID NO: 4), H5 (SEQ ID NO: 5), or H6 (SEQ ID NO: 6).

[0282] Disclosed is a method of preventing the generation of anti-FVIII antibodies that inhibit or impair FVIII treatment comprising, detecting a haplotype in a FVIII gene in a subject, matching a replacement FVIII therapy to the detected haplotype, and administering the matched replacement FVIII therapy to the subject. The haplotype can be H1 (SEQ ID NO: 1), H2 (SEQ ID NO: 2), H3 (SEQ ID NO: 3), H4 (SEQ ID NO: 4), H5 (SEQ ID NO: 5), or H6 (SEQ ID NO: 6).

[0283] Disclosed is a method of maximizing efficacy of transfusion therapy in a subject with a hemostatic disorder comprising, determining whether the FVIII haplotype of a subject having a hemostatic disorder is H1 (SEQ ID NO: 1), H2 (SEQ ID NO: 2), H3 (SEQ ID NO: 3), H4 (SEQ ID NO: 4), H5 (SEQ ID NO: 5), or H6 (SEQ ID NO: 6) and administering an appropriate transfusion product to the subject based on the results. The transfusion product can be a recombinant FVIII. The transfusion product can be plasma derived FVIII.

[0284] Disclosed is a method of administering a blood product to a subject in need of FVIII comprising, obtaining a haplotype in a FVIII gene of a blood product recipient, determining which type of blood product the recipient should receive based on the result, and administering to the subject in need thereof an appropriate blood product. The blood product can be pooled blood plasma derived from more than one blood donor. The blood product can be a plasma-derived FVIII preparation. The pooled blood plasma can be obtained by detecting a haplotype in a FVIII gene of a blood plasma donor and placing the blood plasma of the blood plasma donor in an appropriate FVIII haplotype pool based on the results.

[0285] Disclosed is a method of blood plasma pooling comprising, detecting a haplotype in a FVIII gene of a blood plasma donor and placing blood plasma of the blood plasma donor in an appropriate pool based on the results. Disclosed is a pooled blood plasma product obtained through this method.

[0286] Disclosed is a method of blood plasma pooling comprising, detecting a haplotype in a FVIII gene of a whole blood donor, receiving whole blood from the whole blood donor, separating plasma from the whole blood, and pooling the plasma with plasma obtained from other donors with a similar haplotype. Disclosed is a pooled blood plasma product obtained through this method.

[0287] Disclosed is a method of preparing a plasma-derived FVIII product comprising, determining the haplotype of blood plasma, wherein the haplotype is H1 (SEQ ID NO: 1), H2 (SEQ ID NO: 2), H3 (SEQ ID NO: 3), H4 (SEQ ID NO: 4), H5 (SEQ ID NO: 5), or H6 (SEQ ID NO: 6). and preparing a plasma-derived FVIII product from the haplotyped blood plasma wherein the resulting FVIII product is homogenous with respect to FVIII content. Disclosed is a plasma-derived FVIII product obtained through this method.

[0288] Disclosed is a method of treating a subject with a hemostatic disorder comprising, identifying a subject with a hemostatic disorder, determining the FVIII haplotype of the subject, wherein the haplotype is H1 (SEQ ID NO: 1), H2 (SEQ ID NO: 2), H3 (SEQ ID NO: 3), H4 (SEQ ID NO: 4), H5 (SEQ ID NO: 5), or H6 (SEQ ID NO: 6) and administering an appropriate FVIII gene replacement product to the subject based on the results. The hemostatic disorder can be congenital hemophilia A. The hemostatic disorder can be acquired hemophilia A.

[0289] The replacement product given will vary, depending on the condition of the subject. For example, after determining the FVIII haplotype(s) in a patient with acquired hemophilia A, the disclosed Haplotype-Specific Bethesda assay can be used to determine the haplotype(s) against which their antoanti-FVIII antibodies are reactive. If a given patient's inhibitors are directed against only their own endogenous FVIII molecule(s), or react with one or more of the other forms of the wildtype FVIII protein less then with their own, this Bethesda assay can be used to provide them with the most appropriate replacement FVIII product (i.e., the FVIII haplotype least reactive with their serum).

[0290] In congenital hemophilia, antibody inhibitors against these proteins are known complications of factor replacement therapy. Therefore, the previously untreated subject can be given replacement products based on their congenital haplotype, thereby maximizing transfusion efficacy in the treatment of these other hemostatic disorders.

[0291] As used herein, the term “appropriate” with regard to a transfusion, blood, or gene replacement product refers to an effective, or useful, haplotype, as well as the amount. Those of skill in the art can readily determine an appropriate haplotype based on the methods disclosed herein. Specific dosages and methods of administration are discussed herein as well.

[0292] Disclosed is a method of treating a subject with a hemostatic disorder comprising, identifying a subject with a hemostatic disorder, determining the FVIII haplotype of the subject, wherein the haplotype is H1 (SEQ ID NO: 1), H2 (SEQ ID NO: 2), H3 (SEQ ID NO: 3), H4 (SEQ ID NO: 4), H5 (SEQ ID NO: 5), or H6 (SEQ ID NO: 6) and administering an appropriate plasma-derived FVIII product to the subject based on the results. The hemostatic disorder can be congenital hemophilia A. The hemostatic disorder can be acquired hemophilia A.

[0293] Disclosed is a method of treating a subject with a hemostatic disorder comprising, identifying a subject with a hemostatic disorder, determining the FVIII haplotype of the subject, wherein the haplotype is H1 (SEQ ID NO: 1), H2 (SEQ ID NO: 2), H3 (SEQ ID NO: 3), H4 (SEQ ID NO: 4), H5 (SEQ ID NO: 5), or H6 (SEQ ID NO: 6) and administering an appropriate recombinant FVIII product to the subject based on the results. The hemostatic disorder can be congenital hemophilia A. The hemostatic disorder can be acquired hemophilia A.

[0294] Disclosed is a method for rapidly diagnosing a FVIII haplotype in a subject, comprising, obtaining a sample from the subject, analyzing the sample using rapid PCR, and determining a FVIII haplotype for the subject. The FVIII haplotype can be selected from the group consisting of H1 (SEQ ID NO: 1), H2 (SEQ ID NO: 2), H3 (SEQ ID NO: 3), H4 (SEQ ID NO: 4), H5 (SEQ ID NO: 5), or H6 (SEQ ID NO: 6). The subject can be diagnosed with congenital hemophilia A. The subject can be diagnosed with acquired hemophilia A.

[0295] Disclosed is a method of maximizing the sensitivity and specificity of clinical diagnostic algorithms for identifying a subject with a prothrombotic hemostatic disorder comprising, obtaining a sample from the subject, determining whether the FVIII haplotype of a subject having a hemostatic disorder is H1 (SEQ ID NO: 1), H2 (SEQ ID NO: 2), H3 (SEQ ID NO: 3), H4 (SEQ ID NO: 4), H5 (SEQ ID NO: 5), or H6 (SEQ ID NO: 6) and performing the appropriate additional laboratory diagnostic testing on the subject based on the results.

[0296] Disclosed is a method of treating a subject with a prothrombotic hemostatic disorder comprising, identifying a subject with a hemostatic disorder, determining the FVIII haplotype of the subject, wherein the haplotype is H1 (SEQ ID NO: 1), H2 (SEQ ID NO: 2), H3 (SEQ ID NO: 3), H4 (SEQ ID NO: 4), H5 (SEQ ID NO: 5), or H6 (SEQ ID NO: 6) and administering an appropriate anti-thrombotic prophylactic treatment regimen to the subject based on the results. The hemostatic disorder can be congenital thrombophilia. The hemostatic disorder can be acquired thrombophilia.

[0297] Disclosed are antibodies that target high risk haplotypes of FVIII. Disclosed are antibodies that target peptide regions unique to said high risk haplotypes. Disclosed are agents that neutralize the activity of high risk haplotypes. An agent can be, for example, a monoclonal antibody. Disclosed is an antibody to a polypeptide comprising the sequence as set forth in SEQ ID NO: 19. Disclosed is an n antibody to a polypeptide comprising the sequence as set forth in SEQ ID NO: 20. Disclosed is an n antibody to a polypeptide comprising the sequence as set forth in SEQ ID NO: 21. Disclosed is an n antibody to a polypeptide comprising the sequence as set forth in SEQ ID NO: 22. Disclosed is an antibody to a polypeptide comprising the sequence as set forth in SEQ ID NO: 23. Disclosed is an antibody to a polypeptide comprising the sequence as set forth in SEQ ID NO: 24.

[0298] Disclosed is a method of treating a subject with a prothrombotic hemostatic disorder comprising, identifying a subject with a prothrombotic hemostatic disorder, determining the FVIII haplotype of the subject, wherein the haplotype is H1 (SEQ ID NO: 1), H2 (SEQ ID NO: 2), H3 (SEQ ID NO: 3), H4 (SEQ ID NO: 4), H5 (SEQ ID NO: 5), or H6 (SEQ ID NO: 6) and administering an appropriate anti-thrombotic prophylactic treatment regimen to the subject based on the results. The hemostatic disorder can be congenital hemophilia A. The hemostatic disorder can be acquired hemophilia A.

[0299] Disclosed is a method of treating a subject with a hemostatic disorder comprising, identifying a subject with a hemostatic disorder, determining the FVIII haplotype of the subject, wherein the haplotype is H1 (SEQ ID NO: 1), H2 (SEQ ID NO: 2), H3 (SEQ ID NO: 3), H4 (SEQ ID NO: 4), H5 (SEQ ID NO: 5), or H6 (SEQ ID NO: 6), and administering an appropriate recombinant FVIII product to the subject based on the results. The hemostatic disorder can be congenital hemophilia A. The hemostatic disorder can be acquired hemophilia A.

[0300] Disclosed is a method for rapidly diagnosing a FVIII haplotype in a subject, comprising, obtaining a sample from the subject, analyzing the sample using rapid PCR, determining a FVIII haplotype for the subject. The FVIII haplotype can be selected from the group consisting of H1 (SEQ ID NO: 1), H2 (SEQ ID NO: 2), H3 (SEQ ID NO: 3), H4 (SEQ ID NO: 4), H5 (SEQ ID NO: 5), or H6 (SEQ ID NO: 6). The subject can be diagnosed with congenital hemophilia A. The subject can be diagnosed with acquired hemophilia A.

[0301] Disclosed is a method for rapidly diagnosing a FVIII haplotype in a subject, comprising, obtaining a sample from the subject, analyzing the sample using FVIII haplotype specific antibodies, and determining a FVIII haplotype for the subject. The haplotype can be selected from the group consisting of H1 (SEQ ID NO: 1), H2 (SEQ ID NO: 2), H3 (SEQ ID NO: 3), H4 (SEQ ID NO: 4), H5 (SEQ ID NO: 5), or H6 (SEQ ID NO: 6). The subject can be diagnosed with thrombosis.

[0302] Disclosed is a method of screening to determine the presence of alloantibodies of FVIII comprising, administering FVIII of a known haplotype wherein the haplotype is H1 (SEQ ID NO: 1), H2 (SEQ ID NO: 2), H3 (SEQ ID NO: 3), H4 (SEQ ID NO: 4), H5 (SEQ ID NO: 5), H6 (SEQ ID NO: 6), and determining whether alloantibody binding occurs.

[0303] Disclosed is an oligonucleotide comprising the sequence as set forth in SEQ ID NO: 1. Disclosed is an oligonucleotide comprising the sequence as set forth in SEQ ID NO: 2. Disclosed is an oligonucleotide comprising the sequence as set forth in SEQ ID NO: 3. Disclosed is an oligonucleotide comprising the sequence as set forth in SEQ ID NO: 4. Disclosed is an oligonucleotide comprising the sequence as set forth in SEQ ID NO: 5. Disclosed is an oligonucleotide comprising the sequence as set forth in SEQ ID NO: 6.

[0304] Disclosed is an oligonucleotide comprising a sequence selected from the group consisting of SEQ ID NO:1-12 and 25-124.

[0305] Disclosed is a mixture of primers comprising SEQ ID NOS: 25 and 26. Disclosed is a mixture of primers comprising SEQ ID NOS: 29 and 30. Disclosed is a mixture of primers comprising SEQ ID NOS: 33 and 34. Disclosed is a mixture of primers comprising SEQ ID NOS: 37 and 38. Disclosed is a mixture of primers comprising SEQ ID NOS: 25 and 26. Disclosed is a mixture of primers comprising SEQ ID NOS: 41 and 42. Disclosed is a mixture of primers comprising SEQ ID NOS: 43 and 44. Disclosed is a mixture of primers comprising SEQ ID NOS: 45 and 46. Disclosed is a mixture of primers comprising SEQ ID NOS: 47 and 48. Disclosed is a mixture of primers comprising SEQ ID NOS: 49-124.

[0306] Disclosed is a polypeptide comprising the sequence as set forth in SEQ ID NO: 13. Disclosed is a polypeptide comprising the sequence as set forth in SEQ ID NO: 14. Disclosed is a polypeptide comprising the sequence as set forth in SEQ ID NO: 15. Disclosed is a polypeptide comprising the sequence as set forth in SEQ ID NO: 16. Disclosed is a polypeptide comprising the sequence as set forth in SEQ ID NO: 17. Disclosed is a polypeptide comprising the sequence as set forth in SEQ ID NO: 18. Disclosed is a polypeptide comprising the sequence as set forth in SEQ ID NO: 19. Disclosed is a polypeptide comprising the sequence as set forth in SEQ ID NO: 20. Disclosed is a polypeptide comprising the sequence as set forth in SEQ ID NO: 21. Disclosed is a polypeptide comprising the sequence as set forth in SEQ ID NO: 22. Disclosed is a polypeptide comprising the sequence as set forth in SEQ ID NO: 23. Disclosed is a polypeptide comprising the sequence as set forth in SEQ ID NO: 24.

[0307] Disclosed is a composition comprising pooled FVIII having a single haplotype. The haplotype can be H1, H2, H3, H4, H5 or H6.

[0308] Disclosed is a recombinant FVIII having the H1 haplotype. Disclosed is a recombinant FVIII having the H2 haplotype. Disclosed is a recombinant FVIII having the H3 haplotype. Disclosed is a recombinant FVIII having the H4 haplotype. Disclosed is a recombinant FVIII having the H5 haplotype. Disclosed is a recombinant FVIII having the H6 haplotype.

[0309] Methods of manufacturing recombinant FVIII constructs are disclosed in U.S. Pat. Nos. 6,852,537; 6,770,744; 6,759,216; 6,517,830; 6,458,563; 6,376,463; 6,180,371; 5,888,974; 5,859,204; 5,744,446; 5,663,060; 5,583,209; 5,364,771 incorporated herein by reference.

[0310] 1. Methods of Using the Compositions as Research Tools

[0311] The disclosed compositions can be used in a variety of ways as research tools. For example, the disclosed compositions can be used to study the the various haplotypes of FVIII.

[0312] The compositions can be used for example as targets in combinatorial chemistry protocols or other screening protocols to isolate molecules that possess desired functional properties related to FVIII.

[0313] The disclosed compositions can also be used diagnostic tools related to diseases such as hemophilia and hemostatic disorders, for example.

[0314] The disclosed compositions can be used as discussed herein as either reagents in micro arrays or as reagents to probe or analyze existing microarrays. The disclosed compositions can be used in any known method for isolating or identifying single nucleotide polymorphisms. The compositions can also be used in any method for determining allelic analysis of for example, FVIII haplotypes as described herein, particularly allelic analysis as it relates to H1-H6 and their functions. The compositions can also be used in any known method of screening assays, related to chip/micro arrays. The compositions can also be used in any known way of using the computer readable embodiments of the disclosed compositions, for example, to study relatedness or to perform molecular modeling analysis related to the disclosed compositions.

[0315] 2. Methods of Protein Detection

[0316] An alternative to genetic haplotyping is haplotyping a subject based off the protein expressed by their FVIII gene by detecting an FVIII protein associated with a disclosed haplotype. The disclosed proteins, including FVIII proteins in or on any sample, composition or other context, can be detected using any suitable technique. It is important to be able to separate FVIII from other proteins, as well as to separate FVIII subtypes from each other. Further, molecules that interact with or bind to the disclosed proteins, such as antibodies to a protein, can be detected using known techniques. Many suitable techniques-such as techniques generally known for the detection of proteins, peptides and other analytes and antigens—are known, some of which are described below. In general, these techniques can involve direct imaging (e.g., microscopy), immunoassays, or by functional determination. By “functional determination” is meant that a given protein such as a protein that has a function can be detected by the detection of said function. For example, an enzyme can be detected by evaluating its activity on its substrate. The techniques described below are useful in detecting FVIII in a subject, including the various haplotypes described herein, separating FVIII from other proteins, or in separating various haplotypes of FVIII from each other.

[0317] a) Immunoassays

[0318] Immunodetection methods can be used for detecting, binding, purifying, removing and quantifying various molecules including the disclosed FVIII haplotypes. Further, antibodies and ligands to the disclosed proteins can be detected. For example, the disclosed proteins can be employed to detect antibodies having reactivity therewith. This is useful, for example, to detect whether a subject has been exposed to or has developed antibodies against a protein. Standard immunological techniques are described, e.g., in Hertzenberg, et al., Weir's Handbook of Experimental Immunology, vols. 1-4 (1996); Coligan, Current Protocols in Inmunology (1991); Methods in Enzymology, vols. 70, 73, 74, 84, 92, 93, 108, 116, 121, 132, 150, 162, and 163; and Paul, Fundamental Immunology (3d ed. 1993) each incorporated herein by reference in its entirety and specifically for its teaching regarding immunodetection methods.

[0319] The steps of various useful immunodetection methods have been described in the scientific literature, such as, e.g., Maggio et al., Enzyme-Immunoassay, (1987) and Nakamura, et al., Enzyme Immunoassays: Heterogeneous and Homogeneous Systems, Handbook of Experimental Imnmunology, Vol. 1: Immunochemistry, 27.1-27.20 (1986) each incorporated herein by reference in its entirety and specifically for its teaching regarding immunodetection methods. Immunoassays, in their most simple and direct sense, are binding assays involving binding between antibodies and antigen. Many types and formats of immunoassays are known and all are suitable for detecting the disclosed proteins. Examples of immunoassays are enzyme linked immunosorbent assays (ELISAs), radioimmunoassays (RIA), radioimmune precipitation assays (RIPA), immunobead capture assays, Western blotting, dot blotting, gel-shift assays, Flow cytometry, protein arrays, multiplexed bead arrays, magnetic capture, in vivo imaging, fluorescence resonance energy transfer (FRET), and fluorescence recovery/localization after photobleaching (FRAP/FLAP).

[0320] In general, immunoassays involve contacting a sample suspected of containing a molecule of interest (such as the disclosed proteins) with an antibody to the molecule of interest or contacting an antibody to a molecule of interest (such as antibodies to the disclosed proteins) with a molecule that can be bound by the antibody, as the case may be, under conditions effective to allow the formation of immunocomplexes. Contacting a sample with the antibody to the molecule of interest or with the molecule that can be bound by an antibody to the molecule of interest under conditions effective and for a period of time sufficient to allow the formation of immune complexes (primary immune complexes) is generally a matter of simply bringing into contact the molecule or antibody and the sample and incubating the mixture for a period of time long enough for the antibodies to form immune complexes with, i.e., to bind to, any molecules (e.g. antigens). present to which the antibodies can bind. In many forms of immunoassay, the sample-antibody composition, such as a tissue section, ELISA plate, dot blot or Western blot, can then be washed to remove any non-specifically bound antibody species, allowing only those antibodies specifically bound within the primary immune complexes to be detected.

[0321] The sample used can be any sample that is suspected of containing a molecule of interest (or an antibody to a molecule of interest). The sample can be, for example, one or more cells, tissue, or bodily fluids such as blood, urine, semen, lymphatic fluid, cerebrospinal fluid, or amniotic fluid, or other biological samples, such as tissue culture cells, buccal swabs, mouthwash, stool, tissue slices, tissue sections, homogenized tissue extract, cell membrane preparation, biopsy aspiration, archeological samples such as bone or mummified tissue, infection samples, nosocomial infection samples, production samples, drug preparation samples, biological molecule production samples, protein preparation samples, lipid preparation samples, and/or carbohydrate preparation samples, and separated or purified forms of any of the above.

[0322] Immunoassays can include methods for detecting or quantifying the amount of a molecule of interest (such as the disclosed proteins or their antibodies) in a sample, which methods generally involve the detection or quantitation of any immune complexes formed during the binding process. In general, the detection of immunocomplex formation is well known in the art and can be achieved through the application of numerous approaches. These methods are generally based upon the detection of a label or marker, such as any radioactive, fluorescent, biological or enzymatic tags or any other known label. See, for example, U.S. Pat. Nos. 3,817,837; 3,850,752; 3,939,350; 3,996,345; 4,277,437; 4,275,149 and 4,366,241, each incorporated herein by reference in its entirety and specifically for its teaching regarding immunodetection methods and labels.

[0323] As used herein, a label can include a fluorescent dye, a member of binding pair, such as biotin/streptavidin, a metal (e.g., gold), or an epitope tag that can specifically interact with a molecule that can be detected, such as by producing a colored substrate or fluorescence. Substances suitable for detectably labeling proteins include fluorescent dyes (also known herein as fluorochromes and fluorophores) and enzymes that react with colorometric substrates (e.g., horseradish peroxidase). The use of fluorescent dyes is generally preferred in the practice of the invention as they can be detected at very low amounts. Furthermore, in the case where multiple antigens are reacted with a single array, each antigen can be labeled with a distinct fluorescent compound for simultaneous detection. Labeled spots on the array are detected using a fluorimeter, the presence of a signal indicating an antigen bound to a specific antibody.

[0324] Fluorophores are compounds or molecules that luminesce. Typically fluorophores absorb electromagnetic energy at one wavelength and emit electromagnetic energy at a second wavelength. Representative fluorophores include, but are not limited to, 1,5 IAEDANS; 1,8-ANS; 4-Methylumbelliferone; 5-carboxy-2,7-dichlorofluorescein; 5-Carboxyfluorescein (5-FAM); 5-Carboxynapthofluorescein; 5-Carboxytetramethylrhodamine (5-TAMRA); 5-Hydroxy Tryptamine (5-HAT); 5-ROX (carboxy-X-rhodamine); 6-Carboxyrhodamine 6G; 6-CR 6G; 6-JOE; 7-Amino-4-methylcoumarin; 7-Aminoactinomycin D (7-AAD); 7-Hydroxy-4-I methylcoumarin; 9-Amino-6-chloro-2-methoxyacridine (ACMA); ABQ; Acid Fuchsin; Acridine Orange; Acridine Red; Acridine Yellow; Acriflavin; Acriflavin Feulgen SITSA; Aequorin (Photoprotein); AFPs—AutoFluorescent Protein—(Quantum Biotechnologies) see sgGFP, sgBFP; Alexa Fluor 350™; Alexa Fluor 430™; Alexa Fluor 488™; Alexa Fluor 532™; Alexa Fluor 546™; Alexa Fluor 568™; Alexa Fluor 594™; Alexa Fluor 633™; Alexa Fluor 647™; Alexa Fluor 660™; Alexa Fluor 680™; Alizarin Complexon; Alizarin Red; Allophycocyanin (APC); AMC, AMCA-S; Aminomethylcoumarin (AMCA); AMCA-X; Aminoactinomycin D; Aminocoumarin; Anilin Blue; Anthrocyl stearate; APC-Cy7; APTRA-BTC; APTS; Astrazon Brilliant Red 4G; Astrazon Orange R; Astrazon Red 6B; Astrazon Yellow 7 GLL; Atabrine; ATTO-TAG™ CBQCA; ATTO-TAG™ FQ; Auramine; Aurophosphine G; Aurophosphine; BAO 9 (Bisaminophenyloxadiazole); BCECF (high pH); BCECF (low pH); Berberine Sulphate; Beta Lactamase; BFP blue shifted GFP (Y66H); Blue Fluorescent Protein; BFP/GFP FRET; Bimane; Bisbenzemide; Bisbenzimide (Hoechst); bis-BTC; Blancophor FFG; Blancophor SV; BOBO™-1; BOBO™-3; Bodipy492/515; Bodipy493/503; Bodipy500/510; Bodipy; 505/515; Bodipy 530/550; Bodipy 542/563; Bodipy 558/568; Bodipy 564/570; Bodipy 576/589; Bodipy 581/591; Bodipy 630/650-X; Bodipy 650/665-X; Bodipy 665/676; Bodipy Fl; Bodipy FL ATP; Bodipy Fl-Ceramide; Bodipy R6G SE; Bodipy TMR; Bodipy TMR-X conjugate; Bodipy TMR-X, SE; Bodipy TR; Bodipy TR ATP; Bodipy TR-X SE; BO-PRO™-1; BO-PRO™-3; Brilliant Sulphoflavin FF; BTC; BTC-5N; Calcein; Calcein Blue; Calcium Crimson-; Calcium Green; Calcium Green-1 Ca²⁺ Dye; Calcium Green-2 Ca²⁺; Calcium Green-5N Ca²⁺; Calcium Green-C18 Ca²⁺; Calcium Orange; Calcofluor White; Carboxy-X-rhodamine (5-ROX); Cascade Blue™; Cascade Yellow; Catecholamine; CCF2 (GeneBlazer); CFDA; CFP (Cyan Fluorescent Protein); CFP/YFP FRET; Chlorophyll; Chromomycin A; Chromomycin A; CL-NERF; CMFDA; Coelenterazine; Coelenterazine cp; Coelenterazine f; Coelenterazine fcp; Coelenterazine h; Coelenterazine hcp; Coelenterazine ip; Coelenterazine n; Coelenterazine O; Coumarin Phalloidin; C-phycocyanine; CPM I Methylcoumarin; CTC; CTC Formazan; Cy2™; Cy3.1 8; Cy3.5™; Cy3™; Cy5.1 8; Cy5.5™; Cy5™; Cy7™; Cyan GFP; cyclic AMP Fluorosensor (FiCRhR); Dabcyl; Dansyl; Dansyl Amine; Dansyl Cadaverine; Dansyl Chloride; Dansyl DHPE; Dansyl fluoride; DAPI; Dapoxyl; Dapoxyl 2; Dapoxyl 3′DCFDA; DCFH (Dichlorodihydrofluorescein Diacetate); DDAO; DHR (Dihydorhodamine 123); Di-4-ANEPPS; Di-8-ANEPPS (non-ratio); DiA (4-Di 16-ASP); Dichlorodihydrofluorescein Diacetate (DCFH); DiD-Lipophilic Tracer; DiD (DilC18(5)); DIDS; Dihydorhodamine 123 (DHR); Dil (DilC18(3)); I Dinitrophenol; DiO (DiOC18(3)); DiR; DiR (DilC18(7)); DM-NERF (high pH); DNP; Dopamine; DsRed; DTAF; DY-630-NHS; DY-635-NHS; EBFP; ECFP; EGFP; ELF 97; Eosin; Erythrosin; Erythrosin ITC; Ethidium Bromide; Ethidium homodimer-1 (EthD-1); Euchrysin; EukoLight; Europium (111) chloride; EYFP; Fast Blue; FDA; Feulgen (Pararosaniline); FIF (Formaldehyd Induced Fluorescence); FITC; Flazo Orange; Fluo-3; Fluo-4; Fluorescein (FITC); Fluorescein Diacetate; Fluoro-Emerald; Fluoro-Gold (Hydroxystilbamidine); Fluor-Ruby; FluorX; FM 1-43™; FM 4-46; Fura Red™ (high pH); Fura Red™/Fluo-3; Fura-2; Fura-2/BCECF; Genacryl Brilliant Red B; Genacryl Brilliant Yellow 10GF; Genacryl Pink 3G; Genacryl Yellow 5GF; GeneBlazer; (CCF2); GFP (S65T); GFP red shifted (rsGFP); GFP wild type′ non-UV excitation (wtGFP); GFP wild type, UV excitation (wtGFP); GFPuv; Gloxalic Acid; Granular blue; Haematoporphyrin; Hoechst 33258; Hoechst 33342; Hoechst 34580; HPTS; Hydroxycoumarin; Hydroxystilbamidine (FluoroGold); Hydroxytryptamine; Indo-1, high calcium; Indo-1 low calcium; Indodicarbocyanine (DiD); Indotricarbocyanine (DiR); Intrawhite Cf; JC-1; JO JO-1; JO-PRO-1; LaserPro; Laurodan; LDS 751 (DNA); LDS 751 (RNA); Leucophor PAF; Leucophor SF; Leucophor WS; Lissamine Rhodamine; Lissamine Rhodamine B; Calcein/Ethidium homodimer; LOLO-1; LO-PRO-1; Lucifer Yellow; Lyso Tracker Blue; Lyso Tracker Blue-White; Lyso Tracker Green; Lyso Tracker Red; Lyso Tracker Yellow; LysoSensor Blue; LysoSensor Green; LysoSensor Yellow/Blue; Mag Green; Magdala Red (Phloxin B); Mag-Fura Red; Mag-Fura-2; Mag-Fura-5; Mag-lndo-1; Magnesium Green; Magnesium Orange; Malachite Green; Marina Blue; I Maxilon Brilliant Flavin 10 GFF; Maxilon Brilliant Flavin 8 GFF; Merocyanin; Methoxycoumarin; Mitotracker Green FM; Mitotracker Orange; Mitotracker Red; Mitramycin; Monobromobimane; Monobromobimane (mBBr-GSH); Monochlorobimane; MPS (Methyl Green Pyronine Stilbene); NBD; NBD Amine; Nile Red; Nitrobenzoxedidole; Noradrenaline; Nuclear Fast Red; i Nuclear Yellow; Nylosan Brilliant lavin E8G; Oregon Green™; Oregon Green™488; Oregon Green™ 500; Oregon Green™ 514; Pacific Blue; Pararosaniline (Feulgen); PBFI; PE-Cy5; PE-Cy7; PerCP; PerCP-Cy5.5; PE-TexasRed (Red 613); Phloxin B (Magdala Red); Phorwite AR; Phorwite BKL; Phorwite Rev; Phorwite RPA; Phosphine 3R; PhotoResist; Phycoerythrin B [PE]; Phycoerythrin R [PE]; PKH26 (Sigma); PKH67; PMIA; Pontochrome Blue Black; POPO-1; POPO-3; PO-PRO-1; PO-I PRO-3; Primuline; Procion Yellow; Propidium lodid (Pl); PyMPO; Pyrene; Pyronine; Pyronine B; Pyrozal Brilliant Flavin 7GF; QSY 7; Quinacrine Mustard; Resorufin; RH 414; Rhod-2; Rhodamine; Rhodamine 110; Rhodamine 123; Rhodamine 5 GLD; Rhodamine 6G; Rhodamine B; Rhodamine B 200; Rhodamine B extra; Rhodamine BB; Rhodamine BG; Rhodamine Green; Rhodamine Phallicidine; Rhodamine: Phalloidine; Rhodamine Red; Rhodamine WT; Rose Bengal; R-phycocyanine; R-phycoerythrin (PE); rsGFP; S65A; S65C; S65L; S65T; Sapphire GFP; SBFI; Serotonin; Sevron Brilliant Red 2B; Sevron Brilliant Red 4G; Sevron I Brilliant Red B; Sevron Orange; Sevron Yellow L; sgBFP™ (super glow BFP); sgGFP™ (super glow GFP); SITS (Primuline; Stilbene Isothiosulphonic Acid); SNAFL calcein; SNAFL-1; SNAFL-2; SNARF calcein; SNARFI; Sodium Green; SpectrumAqua; SpectrumGreen; SpectrumOrange; Spectrum Red; SPQ (6-methoxy-N-(3 sulfopropyl) quinolinium); Stilbene; Sulphorhodamine B and C; Sulphorhodamine Extra; SYTO 11; SYTO 12; SYTO 13; SYTO 14; SYTO 15; SYTO 16; SYTO 17; SYTO 18; SYTO 20; SYTO 21; SYTO 22; SYTO 23; SYTO 24; SYTO 25; SYTO 40; SYTO 41; SYTO 42; SYTO 43; SYTO 44; SYTO 45; SYTO 59; SYTO 60; SYTO 61; SYTO 62; SYTO 63; SYTO 64; SYTO 80; SYTO 81; SYTO 82; SYTO 83; SYTO 84; SYTO 85; SYTOX Blue; SYTOX Green; SYTOX Orange; Tetracycline; Tetramethylrhodamine (TRITC); Texas Red™; Texas Red-X™ conjugate; Thiadicarbocyanine (DiSC3); Thiazine Red R; Thiazole Orange; Thioflavin 5; Thioflavin S; Thioflavin TON; Thiolyte; Thiozole Orange; Tinopol CBS (Calcofluor White); TIER; TO-PRO-1; TO-PRO-3; TO-PRO-5; TOTO-1; TOTO-3; TriColor (PE-Cy5); TRITC TetramethylRodaminelsoThioCyanate; True Blue; Tru Red; Ultralite; Uranine B; Uvitex SFC; wt GFP; WW 781; X-Rhodamine; XRITC; Xylene Orange; Y66F; Y66H; Y66W; Yellow GFP; YFP; YO-PRO-1; YO-PRO 3; YOYO-1; YOYO-3; Sybr Green; Thiazole orange (interchelating dyes); semiconductor nanoparticles such as quantum dots; or caged fluorophore (which can be activated with light or other electromagnetic energy source), or a combination thereof.

[0325] Green fluorescent protein (GFP) has become the one of the most popular reporter proteins and as such a nice epitope tag. However, GFP is much larger than most other epitope tags.

[0326] Digoxigenin (DIG) is a small organic molecule that can be covalently added to proteins or nucleic acids, which makes it useful in diverse applications.

[0327] Biotin is a small molecule that can be covalently linked to proteins after they have been translated. Therefore, unlike most other protein epitope tags, it can be added at any point in time and is often used to label proteins located in particular sites such as on the extracellular surface of cells.

[0328] Fluorescent dyes, such as those described herein, for which antibodies are available are also commonly used as epitope tags.

[0329] Labeling can be either direct or indirect. In direct labeling, the detecting antibody (the antibody for the molecule of interest) or detecting molecule (the molecule that can be bound by an antibody to the molecule of interest) include a label. Detection of the label indicates the presence of the detecting antibody or detecting molecule which in turn indicates the presence of the molecule of interest or of an antibody to the molecule of interest, respectively. In indirect labeling, an additional molecule or moiety is brought into contact with, or generated at the site of, the immunocomplex. For example, a signal-generating molecule or moiety such as an enzyme can be attached to or associated with the detecting antibody or detecting molecule. The signal-generating molecule can then generate a detectable signal at the site of the immunocomplex. For example, an enzyme, when supplied with suitable substrate, can produce a visible or detectable product at the site of the immunocomplex. ELISAs use this type of indirect labeling.

[0330] As another example of indirect labeling, an additional molecule (which can be referred to as a binding agent) that can bind to either the molecule of interest or to the antibody to the molecule of interest, such as a second antibody to the molecule of interest, can be contacted with the immunocomplex. The additional molecule can have a label or signal-generating molecule or moiety. The additional molecule can be an antibody, which can thus be termed a secondary antibody. Binding of a secondary antibody to the molecule of interest can form a so-called sandwich with the first (or primary) antibody and the molecule of interest. The immune complexes can be contacted with the labeled, secondary antibody under conditions effective and for a period of time sufficient to allow the formation of secondary immune complexes. The secondary immune complexes can then be generally washed to remove any non-specifically bound labeled secondary antibodies, and the remaining label in the secondary immune complexes can then be detected. The additional molecule can also be or include one of a pair of molecules or moieties that can bind to each other, such as the biotin/avadin pair. In this mode, the detecting antibody or detecting molecule should include the other member of the pair.

[0331] Other modes of indirect labeling include the detection of primary immune complexes by a two step approach. For example, a molecule (which can be referred to as a first binding agent), such as an antibody, that has binding affinity for the molecule of interest or corresponding antibody can be used to form secondary immune complexes, as described above. After washing, the secondary immune complexes can be contacted with another molecule (which can be referred to as a second binding agent) that has binding affinity for the first binding agent, again under conditions effective and for a period of time sufficient to allow the formation of immune complexes (thus forming tertiary immune complexes). The second binding agent can be linked to a detectable label or signal-genrating molecule or moiety, allowing detection of the tertiary immune complexes thus formed. This system can provide for signal amplification.

[0332] Immunoassays that involve the detection of as substance, such as a protein or an antibody to a specific protein, include label-free assays, protein separation methods (i.e., electrophoresis), solid support capture assays, or in vivo detection. Label-free assays are generally diagnostic means of determining the presence or absence of a specific protein, or an antibody to a specific protein, in a sample. Protein separation methods are additionally useful for evaluating physical properties of the protein, such as size or net charge. Capture assays are generally more useful for quantitatively evaluating the concentration of a specific protein, or antibody to a specific protein, in a sample. Finally, in vivo detection is useful for evaluating the spatial expression patterns of the substance, i.e., where the substance can be found in a subject, tissue or cell.

[0333] b) Label-Free Assays

[0334] Provided that the concentrations are sufficient, the molecular complexes ([Ab-Ag]n) generated by antibody-antigen interaction are visible to the naked eye, but smaller amounts may also be detected and measured due to their ability to scatter a beam of light. The formation of complexes indicates that both reactants are present, and in immunoprecipitation assays a constant concentration of a reagent antibody is used to measure specific antigen ([Ab-Ag]n), and reagent antigens are used to detect specific antibody ([Ab-Ag]n). If the reagent species is previously coated onto cells (as in hemagglutination assay) or very small particles (as in latex agglutination assay), “clumping” of the coated particles is visible at much lower concentrations. A variety of assays based on these elementary principles are in common use, including Ouchterlony immunodiffusion assay, rocket immunoelectrophoresis, and immunoturbidometric and nephelometric assays. The main limitations of such assays are restricted sensitivity (lower detection limits) in comparison to assays employing labels and, in some cases, the fact that very high concentrations of analyte can actually inhibit complex formation, necessitating safeguards that make the procedures more complex. Some of these Group 1 assays date right back to the discovery of antibodies and none of them have an actual “label” (e.g. Ag-enz). Other kinds of immunoassays that are label free depend on immunosensors, and a variety of instruments that can directly detect antibody-antigen interactions are now commercially available. Most depend on generating an evanescent wave on a sensor surface with immobilized ligand, which allows continuous monitoring of binding to the ligand. Immunosensors allow the easy investigation of kinetic interactions and, with the advent of lower-cost specialized instruments, may in the future find wide application in immunoanalysis.

[0335] c) Protein Separation

[0336] The use ofimmunoassays to detect a specific protein can involve the separation of the proteins by electophoresis. This can be done to separate FVIII from other proteins, as well as separating FVIII subtypes from each other. Electrophoresis is the migration of charged molecules in solution in response to an electric field. Their rate of migration depends on the strength of the field; on the net charge, size and shape of the molecules and also on the ionic strength, viscosity and temperature of the medium in which the molecules are moving. As an analytical tool, electrophoresis is simple, rapid and highly sensitive. It is used analytically to study the properties of a single charged species, and as a separation technique.

[0337] Generally the sample is run in a support matrix such as paper, cellulose acetate, starch gel, agarose or polyacrylamide gel. The matrix inhibits convective mixing caused by heating and provides a record of the electrophoretic run: at the end of the run, the matrix can be stained and used for scanning, autoradiography or storage. In addition, the most commonly used support matrices—agarose and polyacrylamide—provide a means of separating molecules by size, in that they are porous gels. A porous gel may act as a sieve by retarding, or in some cases completely obstructing, the movement of large macromolecules while allowing smaller molecules to migrate freely. Because dilute agarose gels are generally more rigid and easy to handle than polyacrylamide of the same concentration, agarose is used to separate larger macromolecules such as nucleic acids, large proteins and protein complexes. Polyacrylamide, which is easy to handle and to make at higher concentrations, is used to separate most proteins and small oligonucleotides that require a small gel pore size for retardation.

[0338] Proteins are amphoteric compounds; their net charge therefore is determined by the pH of the medium in which they are suspended. In a solution with a pH above its isoelectric point, a protein has a net negative charge and migrates towards the anode in an electrical field. Below its isoelectric point, the protein is positively charged and migrates towards the cathode. The net charge carried by a protein is in addition independent of its size—i.e., the charge carried per unit mass (or length, given proteins and nucleic acids are linear macromolecules) of molecule differs from protein to protein. At a given pH therefore, and under non-denaturing conditions, the electrophoretic separation of proteins is determined by both size and charge of the molecules.

[0339] Sodium dodecyl sulphate (SDS) is an anionic detergent which denatures proteins by “wrapping around” the polypeptide backbone—and SDS binds to proteins fairly specifically in a mass ratio of 1.4:1. In so doing, SDS confers a negative charge to the polypeptide in proportion to its length. Further, it is usually necessary to reduce disulphide bridges in proteins (denature) before they adopt the random-coil configuration necessary for separation by size: this is done with 2-mercaptoethanol or dithiothreitol (DTT). In denaturing SDS-PAGE separations therefore, migration is determined not by intrinsic electrical charge of the polypeptide, but by molecular weight.

[0340] Determination of Molecular Weight is done by SDS-PAGE of proteins of known molecular weight along with the protein to be characterized. A linear relationship exists between the logarithm of the molecular weight of an SDS-denatured polypeptide, or native nucleic acid, and its Rf. The Rf is calculated as the ratio of the distance migrated by the molecule to that migrated by a marker dye-front. A simple way of determining relative molecular weight by electrophoresis (Mr) is to plot a standard curve of distance migrated vs. log 10MW for known samples, and read off the log Mr of the sample after measuring distance migrated on the same gel.

[0341] In two-dimensional electrophoresis, proteins are fractionated first on the basis of one physical property, and, in a second step, on the basis of another. For example, isoelectric focusing can be used for the first dimension, conveniently carried out in a tube gel, and SDS electrophoresis in a slab gel can be used for the second dimension. One example of a procedure is that of O'Farrell, P. H., High Resolution Two-dimensional Electrophoresis of Proteins, J. Biol. Chem. 250:4007-4021 (1975), herein incorporated by reference in its entirety for its teaching regarding two-dimensional electrophoresis methods. Other examples include but are not limited to, those found in Anderson, L and Anderson, N G, High resolution two-dimensional electrophoresis of human plasma proteins, Proc. Natl. Acad. Sci. 74:5421-5425 (1977), Ornstein, L., Disc electrophoresis, L. Ann. N.Y. Acad. Sci. 121:321349 (1964), each herein incorporated by reference in its entirety for its teaching regarding electrophoresis methods.

[0342] Laemmli, U. K., Cleavage of structural proteins during the assembly of the head of bacteriophage T4, Nature 227:680 (1970), herein incorporated by reference in its entirety for its teaching regarding electrophoresis methods, discloses a discontinuous system for resolving proteins denatured with SDS. The leading ion in the Laemmli buffer system is chloride, and the trailing ion is glycine. Accordingly, the resolving gel and the stacking gel are made up in Tris-HCl buffers (of different concentration and pH), while the tank buffer is Tris-glycine. All buffers contain 0.1% SDS.

[0343] Western Blot

[0344] One example of an immunoassay that uses electrophoresis that is contemplated in the current methods is Western Blot analysis. Western blot can be used to detect FVIII subtypes, for example. Western blotting or immunoblotting allows the determination of the molecular mass of a protein and the measurement of relative amounts of the protein present in different samples. Detection methods include chemiluminescence and chromagenic detection. Standard methods for Western Blot analysis can be found in, for example, D. M. Bollag et al., Protein Methods (2d edition 1996) and E. Harlow & D. Lane, Antibodies, a Laboratory Manual (1988), U.S. Pat. No. 4,452,901, each herein incorporated by reference in their entirety for their teaching regarding Western Blot methods. Generally, proteins are separated by gel electrophoresis, usually SDS-PAGE. The proteins are transferred to a sheet of special blotting paper, e.g., nitrocellulose, though other types of paper, or membranes, can be used. The proteins retain the same pattern of separation they had on the gel. The blot is incubated with a generic protein (such as milk proteins) to bind to any remaining sticky places on the nitrocellulose. An antibody is then added to the solution which is able to bind to its specific protein.

[0345] The attachment of specific antibodies to specific immobilized antigens can be readily visualized by indirect enzyme immunoassay techniques, usually using a chromogenic substrate (e.g. alkaline phosphatase or horseradish peroxidase) or chemiluminescent substrates. Other possibilities for probing include the use of fluorescent or radioisotope labels (e.g., fluorescein, ¹²⁵I). Probes for the detection of antibody binding can be conjugated anti-immunoglobulins, conjugated staphylococcal Protein A (binds IgG), or probes to biotinylated primary antibodies (e.g., conjugated avidin/streptavidin).

[0346] The power of the technique lies in the simultaneous detection of a specific protein by means of its antigenicity, and its molecular mass: proteins are first separated by mass in the SDS-PAGE, then specifically detected in the immunoassay step. Thus, protein standards (ladders) can be run simultaneously in order to approximate molecular mass of the protein of interest in a heterogeneous sample.

[0347] d) Radioimmune Precipitation Assay (RIPA)

[0348] Radioimmune Precipitation Assay (RIPA) is a sensitive assay using radiolabeled antigens to detect specific antibodies in serum. The antigens are allowed to react with the serum and then precipitated using a special reagent such as, for example, protein A sepharose beads. The bound radiolabeled immunoprecipitate is then commonly analyzed by gel electrophoresis. Radioimmunoprecipitation assay (RIPA) is often used as a confirmatory test for diagnosing the presence of HIV antibodies. RIPA is also referred to in the art as Farr Assay, Precipitin Assay, Radioimmune Precipitin Assay; Radioimmunoprecipitation Analysis; Radioimmunoprecipitation Analysis, and Radioimmunoprecipitation Analysis.

[0349] e) Capture Assays

[0350] While the above immunoassays that utilize electrophoresis to separate and detect the specific proteins of interest allow for evaluation of protein size, they are not very sensitive for evaluating protein concentration. However, also contemplated are immunoassays wherein the protein or antibody specific for the protein is bound to a solid support (e.g., tube, well, bead, or cell) to capture the antibody or protein of interest, respectively, from a sample, combined with a method of detecting the protein or antibody specific for the protein on the support. Examples of such immunoassays include Radioimmunoassay (RIA), Enzyme-Linked Immunosorbent Assay (ELISA), Flow cytometry, protein array, multiplexed bead assay, and magnetic capture.

[0351] (1) Radioimmunoassay (RIA)

[0352] Radioimmunoassay (RIA) is a classic quantitative assay for detection of antigen-antibody reactions using a radioactively labeled substance (radioligand), either directly or indirectly, to measure the binding of the unlabeled substance to a specific antibody or other receptor system. Radioimmunoassay is used, for example, to test hormone levels in the blood without the need to use a bioassay. Non-immunogenic substances (e.g., haptens) can also be measured if coupled to larger carrier proteins (e.g., bovine gamma-globulin or human serum albumin) capable of inducing antibody formation.

[0353] RIA involves mixing a radioactive antigen (because of the ease with which iodine atoms can be introduced into tyrosine residues in a protein, the radioactive isotopes ¹²⁵I or ¹³¹I are often used.) with antibody to that antigen. The antibody is generally linked to a solid support, such as the tube or beads. Unlabeled or “cold” antigen is then adding in known quantities and measuring the amount of labeled antigen displaced. Initially, the radioactive antigen is bound to the antibodies. When cold antigen is added, the two compete for antibody binding sites—and at higher concentrations of cold antigen, more binds to the antibody, displacing the radioactive variant. The bound antigens are separated from the unbound ones in solution and the radioactivity of each used to plot a binding curve. The technique is both extremely sensitive, and specific.

[0354] (2) ELISAs

[0355] Enzyme-Linked Immunosorbent Assay (ELISA), or more generically termed EIA (Enzyme ImmunoAssay), is an immunoassay that can detect an antibody specific for a protein. ELISA is useful with the methods disclosed herein, in that the FVIII protein can be detected using this assay, including but not limited to specific haplotypes of FVIII. In such an assay, a detectable label bound to either an antibody-binding or antigen-binding reagent is an enzyme. When exposed to its substrate, this enzyme reacts in such a manner as to produce a chemical moiety which can be detected, for example, by spectrophotometric, fluorometric or visual means. Enzymes which can be used to detectably label reagents useful for detection include, but are not limited to, horseradish peroxidase, alkaline phosphatase, glucose oxidase, β-galactosidase, ribonuclease, urease, catalase, malate dehydrogenase, staphylococcal nuclease, asparaginase, yeast alcohol dehydrogenase, alpha.-glycerophosphate dehydrogenase, triose phosphate isomerase, glucose-6-phosphate dehydrogenase, glucoamylase and acetylcholinesterase. For descriptions of ELISA procedures, see Voller, A. et al., J. Clin. Pathol. 31:507-520 (1978); Butler, J. E., Meth. Enzymol. 73:482-523 (1981); Maggio, E. (ed.), Enzyme Immunoassay, CRC Press, Boca Raton, 1980; Butler, J. E., In: Structure of Antigens, Vol. 1 (Van Regenmortel, M., CRC Press, Boca Raton, 1992, pp. 209-259; Butler, J. E., In: van Oss, C. J. et al., (eds), Immunochemistry, Marcel Dekker, Inc., New York, 1994, pp. 759-803; Butler, J. E. (ed.), Immunochemistry of Solid-Phase Immunoassay, CRC Press, Boca Raton, 1991); Crowther, “ELISA: Theory and Practice,” In: Methods in Molecule Biology, Vol. 42, Humana Press; New Jersey, 1995; U.S. Pat. No. 4,376,110, each incorporated herein by reference in its entirety and specifically for its teaching regarding ELISA methods.

[0356] Variations of ELISA techniques are know to those of skill in the art. In one variation, antibodies that can bind to proteins can be immobilized onto a selected surface exhibiting protein affinity, such as a well in a polystyrene microtiter plate. Then, a test composition suspected of containing a marker antigen can be added to the wells. After binding and washing to remove non-specifically bound immunocomplexes, the bound antigen can be detected. Detection can be achieved by the addition of a second antibody specific for the target protein, which is linked to a detectable label. This type of ELISA is a simple “sandwich ELISA”. Detection also can be achieved by the addition of a second antibody, followed by the addition of a third antibody that has binding affinity for the second antibody, with the third antibody being linked to a detectable label.

[0357] Another variation is a competition ELISA. In competition ELISA's, test samples compete for binding with known amounts of labeled antigens or antibodies. The amount of reactive species in the sample can be determined by mixing the sample with the known labeled species before or during incubation with coated wells. The presence of reactive species in the sample acts to reduce the amount of labeled species available for binding to the well and thus reduces the ultimate signal.

[0358] Irrespective of the format employed, ELISAs have certain features in common, such as coating, incubating or binding, washing to remove non-specifically bound species, and detecting the bound immunecomplexes. Antigen or antibodies can be linked to a solid support, such as in the form of plate, beads, dipstick, membrane or column matrix, and the sample to be analyzed applied to the immobilized antigen or antibody. In coating a plate with either antigen or antibody, one will generally incubate the wells of the plate with a solution of the antigen or antibody, either overnight or for a specified period of hours. The wells of the plate can then be washed to remove incompletely adsorbed material. Any remaining available surfaces of the wells can then be “coated” with a nonspecific protein that is antigenically neutral with regard to the test antisera. These include bovine serum albumin (BSA), casein and solutions of milk powder. The coating allows for blocking of nonspecific adsorption sites on the immobilizing surface and thus reduces the background caused by nonspecific binding of antisera onto the surface.

[0359] In ELISAs, a secondary or tertiary detection means rather than a direct procedure can also be used. Thus, after binding of a protein or antibody to the well, coating with a non-reactive material to reduce background, and washing to remove unbound material, the immobilizing surface is contacted with the control clinical or biological sample to be tested under conditions effective to allow immunecomplex (antigen/antibody) formation. Detection of the immunecomplex then requires a labeled secondary binding agent, or a secondary binding agent in conjunction with a labeled third binding agent.

[0360] “Under conditions effective to allow immunecomplex (antigen/antibody) formation” means that the conditions include diluting the antigens and antibodies with solutions such as BSA, bovine gamma globulin (BGG) and phosphate buffered saline (PBS)/Tween. These added agents can also assist in the reduction of nonspecific background.

[0361] The “suitable” conditions also mean that the incubation is at a temperature and for a period of time sufficient to allow effective binding. Incubation steps can typically be from about 1 minute to twelve hours, at temperatures of about 20° to 30° C., or can be incubated overnight at about 0° C. to about 10° C.

[0362] Following all incubation steps in an ELISA, the contacted surface can be washed so as to remove non-complexed material. A washing procedure can include washing with a solution such as PBS/Tween, or borate buffer. Following the formation of specific immunecomplexes between the test sample and the originally bound material, and subsequent washing, the occurrence of even minute amounts of immunecomplexes can be determined.

[0363] To provide a detecting means, the second or third antibody can have an associated label to allow detection, as described above. This can be an enzyme that can generate color development upon incubating with an appropriate chromogenic substrate. Thus, for example, one can contact and incubate the first or second immunecomplex with a labeled antibody for a period of time and under conditions that favor the development of further immunecomplex formation (e.g., incubation for 2 hours at room temperature in a PBS-containing solution such as PBS-Tween).

[0364] After incubation with the labeled antibody, and subsequent to washing to remove unbound material, the amount of label can be quantified, e.g., by incubation with a chromogenic substrate such as urea and bromocresol purple or 2,2′-azido-di-(3-ethyl-benzthiazoline-6-sulfonic acid [ABTS] and H₂O₂, in the case of peroxidase as the enzyme label. Quantitation can then be achieved by measuring the degree of color generation, e.g., using a visible spectra spectrophotometer.

[0365] (3) Flow Cytometry

[0366] Flow cytometry can be used to detect various FVIII haplotypes, and can be used to purify mixed samples of haplotypes, as disclosed herein. Flow cytometry, fluorescent activated cell sorting (FACS), or flow microfluorometry provides the means of scanning individual cells for the presence of a molecule of interest. Flow Cytometry is the characterization of single cells as they pass at high speed through a laser beam. While a hematologist can count 200 cells in less than a minute by hand (hemocytometer) on a stage microscope, a flow cytometer can discriminate cells at speeds up to 50,000 cells/second. The Flow component is a fluidics system that precisely delivers the cells at the intersection of the laser beam and light gathering lens by hydrodynamic focusing (a single stream of cells is injected and confined within an outer stream at greater pressure). The laser acting as a light source develops parameters of light scatter as well as exciting the fluorescent molecules used to label the cell. Cells are characterized individually by their physical and/or chemical properties (Kohler, G. and Milstein, C. (1975) Continuous Cultures of Fused Cells Secreting Antibody of Predefined Specificity. Nature 256: p. 495-49) which provide analytical parameters capable of accurate quantitation of the number of molecules/cell through Quantitative Flow Cytometry (QFCM). The physical (morphological) profile of a cell can be observed by combining forward light scatter (FS) and orthogonal or side light scatter (SSC). In forward light scatter the laser beam is interrupted by the cell and the light that passes around the cell is measured. Comparable to casting shadow puppets on a wall with a flashlight. This measurement is an indication of the cell's unique refractive index which depends on a cell's size, organelles, water and molecular contents. The refractive index (forward scatter) of a cell can change through cell cycle progression, activation, fixation, etc. Cellular side scatter is the light that is reflected 90° to the laser beam (all fluorescence is emitted and therefore collected at this angle) and is an indication of cytoplasmic density or cell surface granularity.

[0367] A short list of some of the information that can be discerned by multiparameter (multi-color) Flow Cytometry includes; Apoptosis (programmed cell death), Cell Type, DNA Content, Enzyme Activity, Intracellular Proteins, Cell Surface Antigens, Cytoplasmic Granularity, Surface Membrane Integrity, Intracellular [Ca++]-Signal Transduction, DNA Synthesis-Proliferation, Cell Surface Receptors, Intracellular Cytokines, Oxidative Metabolism, Intracellular pH, RNA Content, and Cell Size.

[0368] Antibodies can provide a useful tool for the analysis and quantitation of markers of individual cells. Such flow cytometric analyses are described in Melamed, et al., Flow Cytometry and Sorting (1990); Shapiro, Practical Flow Cytometry (1988); and Robinson, et al., Handbook of Flow Cytometry Methods (1993), each herein incorporated by reference in its entirety for their teaching regarding FACS. Generally, proteins are detected with antibodies that have been conjugated to fluorescent molecules such as FITC, PE, Texas Red, APC, etc. Detection of molecules on the cell surface (immunophenotyping) is most common, but with a few modifications, proteins can be identified in the cytoplasm (e.g. cytokines), or in the nucleus (e.g. cell cycle control proteins).

[0369] By tagging antibodies with a colored fluorochrome, it is easy to distinguish the cell type and quantity of antigens expressed by each cell. Employing dichroic splitting mirrors, band pass filters and compensation, the colors can be resolved where each color is associated with a single antibody. As each cell, tagged with a fluorescently labeled antibody, enters the laser light outer orbital electrons in the fluorochrome are excited at a specific excitation wavelength (e.g., 494 nm for FITC). As it transitions the width of the laser beam maximum peak fluorescence is achieved within approximately 10 nsec as the excited outer orbital electrons return to their more stable ground state and emit a photon of light at a longer wavelength (e.g., 520 nm for FITC) than that at which they were excited. Photomultiplier tubes (PMT's) detect these faint fluorescent signals and their sole role is to change discrete packets of light called photons (hv) into electrons and amplify them by producing as much as 10 million electrons for every photon captured.

[0370] In addition, cytoplasmic and nuclear membranes can be breached (permeabilized) to introduce, for example, antibodies against intracellular proteins or stain nucleic acids with intercalating dyes (propidium iodide, 7-AAD, etc.) or DNA base specific dyes (Hoescht). In addition, BrdU incorporation for cell proliferation can be measured by immunofluorescence. DNA intercalating dyes, such as for example propidium iodide, allow the identification of which cells are diploid (G0, resting, non-dividing cells, or any cycling cells in G1), which cells are in S phase of the cell cycle during which DNA is replicated, and which cells are G2 or in mitosis. Tumor cells are often aneuploid—that is, they have too many or too few chromosomes compared to the normal diploid DNA number for the species.

[0371] Apoptosis can be measured in a number of ways. The TUNEL technique identifies DNA strand breaks. Annexin V immunolabeling detects changes in the plasma membrane asymmetry. Nuclear condensation and DNA loss are demonstrated by hypodiploid peaks in DNA content experiments. Uptake of Hoechst 33258 has also been shown to increase with apoptotic changes.

[0372] Fluorescence-activated cell sorting (FACS) is a type of flow cytometry. FACS is a method for sorting a suspension of biologic cells into two or more containers, one cell at a time. Fluorescence-activated cell sorting is based upon specific light scattering and fluorescence characteristics of each cell. In FACS, the cell suspension is entrained in the center of a narrow, rapidly flowing stream of liquid. The flow is arranged so that there is a large separation between cells relative to their diameter. A vibrating mechanism causes the stream of cells to break into individual droplets. The system is adjusted so that there is a low probability of more than one cell being in a droplet. Just before the stream breaks into droplets the flow passes through a fluorescence measuring station where the fluorescence character of interest of each cell is measured. An electrical charging ring is placed just at the point where the stream breaks into droplets. A charge is placed on the ring based on the immediately prior fluorescence intensity measurement and the opposite charge is trapped on the droplet as it breaks from the stream. The charged droplets then fall through an electrostatic deflection system that diverts droplets into containers based upon their charge.

[0373] (4) Protein Arrays

[0374] Protein arrays are useful with the methods disclosed herein as assays for detection of various FVIII haplotypes in an individual or in collective samples, for example. Protein arrays are solid-phase ligand binding assay systems using immobilised proteins on surfaces which include glass, membranes, microtiter wells, mass spectrometer plates, and beads or other particles. The assays are highly parallel (multiplexed) and often miniaturised (microarrays, protein chips). Their advantages include being rapid and automatable, capable of high sensitivity, economical on reagents, and giving an abundance of data for a single experiment. Bioinformatics support is important; the data handling demands sophisticated software and data comparison analysis. However, the software can be adapted from that used for DNA arrays, as can much of the hardware and detection systems.

[0375] One of the chief formats is the capture array, in which ligand-binding reagents, which are usually antibodies but can also be alternative protein scaffolds, peptides or nucleic acid aptamers, are used to detect target molecules in mixtures such as plasma or tissue extracts. In diagnostics, capture arrays can be used to carry out multiple immunoassays in parallel, both testing for several analytes in individual sera for example and testing many serum samples simultaneously. In proteomics, capture arrays are used to quantitate and compare the levels of proteins in different samples in health and disease, i.e. protein expression profiling. Proteins other than specific ligand binders are used in the array format for in vitro functional interaction screens such as protein-protein, protein-DNA, protein-drug, receptor-ligand, enzyme-substrate, etc. They may also be used to correlate the polymorphic changes resulting from SNPs with protein function. The capture reagents themselves are selected and screened against many proteins, which can also be done in a multiplex array format against multiple protein targets.

[0376] For construction of arrays, sources of proteins include cell-based expression systems for recombinant proteins, purification from natural sources, production in vitro by cell-free translation systems, and synthetic methods for peptides. Many of these methods can be automated for high throughput production. For capture arrays and protein function analysis, it is important that proteins should be correctly folded and functional; this is not always the case, e.g. where recombinant proteins are extracted from bacteria under denaturing conditions. Nevertheless, arrays of denatured proteins are useful in screening antibodies for cross-reactivity, identifying autoantibodies and selecting ligand binding proteins.

[0377] Protein arrays have been designed as a miniaturisation of familiar immunoassay methods such as ELISA and dot blotting, often utilizing fluorescent readout, and facilitated by robotics and high throughput detection systems to enable multiple assays to be carried out in parallel. Commonly used physical supports include glass slides, silicon, microwells, nitrocellulose or PVDF membranes, and magnetic and other microbeads. While microdrops of protein delivered onto planar surfaces are the most familiar format, alternative architectures include CD centrifugation devices based on developments in microfluidics [Gyros] and specialised chip designs, such as engineered microchannels in a plate [The Living Chip™, Biotrove] and tiny 3D posts on a silicon surface [Zyomyx]. Particles in suspension can also be used as the basis of arrays, providing they are coded for identification; systems include colour coding for microbeads [Luminex, Bio-Rad] and semiconductor nanocrystals [QDots™, Quantum Dots], and barcoding for beads [UltraPlex™, Smartbeads] and multimetal microrods [Nanobarcodes™ particles, Nanoplex Technologies]. Beads can also be assembled into planar arrays on semiconductor chips [LEAPS technology, BioArray Solutions].

[0378] Immobilization of proteins involves both the coupling reagent and the nature of the surface being coupled to. A good protein array support surface is chemically stable before and after the coupling procedures, allows good spot morphology, displays minimal nonspecific binding, does not contribute a background in detection systems, and is compatible with different detection systems. The immobilization method used are reproducible, applicable to proteins of different properties (size, hydrophilic, hydrophobic), amenable to high throughput and automation, and compatible with retention of fully functional protein activity. Orientation of the surface-bound protein is recognized as an important factor in presenting it to ligand or substrate in an active state; for capture arrays the most efficient binding results are obtained with orientated capture reagents, which generally require site-specific labeling of the protein.

[0379] Both covalent and noncovalent methods of protein immobilization are used and have various pros and cons. Passive adsorption to surfaces is methodologically simple, but allows little quantitative or orientational control; it may or may not alter the functional properties of the protein, and reproducibility and efficiency are variable. Covalent coupling methods provide a stable linkage, can be applied to a range of proteins and have good reproducibility; however, orientation may be variable, chemical derivatization may alter the function of the protein and requires a stable interactive surface. Biological capture methods utilizing a tag on the protein provide a stable linkage and bind the protein specifically and in reproducible orientation, but the biological reagent must first be immobilized adequately and the array may require special handling and have variable stability.

[0380] Several immobilization chemistries and tags have been described for fabrication of protein arrays. Substrates for covalent attachment include glass slides coated with amino- or aldehyde-containing silane reagents. In the Versalinx™ system [Prolinx], reversible covalent coupling is achieved by interaction between the protein derivatised with phenyldiboronic acid, and salicylhydroxamic acid immobilized on the support surface. This also has low background binding and low intrinsic fluorescence and allows the immobilized proteins to retain function. Noncovalent binding of unmodified protein occurs within porous structures such as HydroGel™ [PerkinElmer], based on a 3-dimensional polyacrylamide gel; this substrate is reported to give a particularly low background on glass microarrays, with a high capacity and retention of protein function. Widely used biological coupling methods are through biotin/streptavidin or hexahistidine/Ni interactions, having modified the protein appropriately. Biotin may be conjugated to a poly-lysine backbone immobilised on a surface such as titanium dioxide [Zyomyx] or tantalum pentoxide [Zeptosens].

[0381] Array fabrication methods include robotic contact printing, ink-jetting, piezoelectric spotting and photolithography. A number of commercial arrayers are available [e.g. Packard Biosience] as well as manual equipment [V & P Scientific]. Bacterial colonies can be robotically gridded onto PVDF membranes for induction of protein expression in situ.

[0382] At the limit of spot size and density are nanoarrays, with spots on the nanometer spatial scale, enabling thousands of reactions to be performed on a single chip less than 1 mm square. BioForce Laboratories have developed nanoarrays with 1521 protein spots in 85sq microns, equivalent to 25 million spots per sq cm, at the limit for optical detection; their readout methods are fluorescence and atomic force microscopy (AFM).

[0383] Fluorescence labeling and detection methods are widely used. The same instrumentation as used for reading DNA microarrays is applicable to protein arrays. For differential display, capture (e.g. antibody) arrays can be probed with fluorescently labeled proteins from two different cell states, in which cell lysates are directly conjugated with different fluorophores (e.g. Cy-3, Cy-5) and mixed, such that the color acts as a readout for changes in target abundance. Fluorescent readout sensitivity can be amplified 10-100 fold by tyramide signal amplification (TSA) [PerkinElmer Lifesciences]. Planar waveguide technology [Zeptosens] enables ultrasensitive fluorescence detection, with the additional advantage of no intervening washing procedures. High sensitivity can also be achieved with suspension beads and particles, using phycoerythrin as label [Luminex] or the properties of semiconductor nanocrystals [Quantum Dot]. A number of novel alternative readouts have been developed, especially in the commercial biotech arena. These include adaptations of surface plasmon resonance [HTS Biosystems, Intrinsic Bioprobes], rolling circle DNA amplification [Molecular Staging], mass spectrometry [Ciphergen, Intrinsic Bioprobes], resonance light scattering [Genicon Sciences] and atomic force microscopy [BioForce Laboratories].

[0384] Capture arrays form the basis of diagnostic chips and arrays for expression profiling. They employ high affinity capture reagents, such as conventional antibodies, single domains, engineered scaffolds, peptides or nucleic acid aptamers, to bind and detect specific target ligands in high throughput manner.

[0385] Antibody arrays have the required properties of specificity and acceptable background, and some are available commercially [BD Biosciences Clontech, BioRad, Sigma]. Antibodies for capture arrays are made either by conventional immunisation (polyclonal sera and hybridomas), or as recombinant fragments, usually expressed in E. coli, after selection from phage or ribosome display libraries [Cambridge Antibody Technology, Biolnvent, Affitech, Biosite]. In addition to the conventional antibodies, Fab and scFv fragments, single V-domains from camelids or engineered human equivalents [Domantis] may also be useful in arrays.

[0386] The term ‘scaffold’ refers to ligand-binding domains of proteins, which are engineered into multiple variants capable of binding diverse target molecules with antibody-like properties of specificity and affinity. The variants can be produced in a genetic library format and selected against individual targets by phage, bacterial or ribosome display. Such ligand-binding scaffolds or frameworks include ‘Affibodies’ based on Staph. aureus protein A [Affibody], ‘Trinectins’ based on fibronectins [Phylos] and ‘Anticalins’ based on the lipocalin structure [Pieris]. These can be used on capture arrays in a similar fashion to antibodies and may have advantages of robustness and ease of production.

[0387] Nonprotein capture molecules, notably the single-stranded nucleic acid aptamers which bind protein ligands with high specificity and affinity, are also used in arrays [SomaLogic]. Aptamers are selected from libraries of oligonucleotides by the Selex™ procedure and their interaction with protein can be enhanced by covalent attachment, through incorporation of brominated deoxyuridine and UV-activated crosslinking (photoaptamers). Photocrosslinking to ligand reduces the crossreactivity of aptamers due to the specific steric requirements. Aptamers have the advantages of ease of production by automated oligonucleotide synthesis and the stability and robustness of DNA; on photoaptamer arrays, universal fluorescent protein stains can be used to detect binding.

[0388] Protein analytes binding to antibody arrays may be detected directly or via a secondary antibody in a sandwich assay. Direct labelling is used for comparison of different samples with different colours. Where pairs of antibodies directed at the same protein ligand are available, sandwich immunoassays provide high specificity and sensitivity and are therefore the method of choice for low abundance proteins such as cytokines; they also give the possibility of detection of protein modifications. Label-free detection methods, including mass spectrometry, surface plasmon resonance and atomic force microscopy, avoid alteration of ligand. What is required from any method is optimal sensitivity and specificity, with low background to give high signal to noise. Since analyte concentrations cover a wide range, sensitivity has to be tailored appropriately; serial dilution of the sample or use of antibodies of different affinities are solutions to this problem. Proteins of interest are frequently those in low concentration in body fluids and extracts, requiring detection in the pg range or lower, such as cytokines or the low expression products in cells.

[0389] The question of cross-reactivity is an important one which applies to all ligand binders and particularly to antibodies, being the most popular reagents. While antibodies are thought of as being highly specific, monoclonals can show unpredictable cross-reactions which will be revealed by thorough screening. The ultimate usefulness of individual reagents then depends on the relative level of cross-reaction and specific reaction. The use of sandwich assays, in which antibody pairs are used to bind and detect ligand, may go a long way towards eliminating the problem, since it is unlikely that both members of the sandwich will exhibit the same cross-reactivity. Polyclonal antibodies are emerging as array reagents for protein expression studies; although they require affinity purification, rabbit sera are easier to produce than monoclonals, and cross-reactions may be reduced as a result of heterogeneity. There are ambitious projects to raise monoclonal antibodies and antisera against the entire human proteome.

[0390] An important general principle is that, for optimal specificity where assays are highly multiplexed, it is essential to provide dual level target recognition, i.e. two levels of specificity for each locus in the array. Sandwich assays achieve this with two antibodies, photocrosslinking reduces the cross-reactivity of aptamers and MS provides definitive label-free protein identification.

[0391] An alternative to an array of capture molecules is one made through molecular imprinting technology, in which peptides (e.g. from the C-terminal regions of proteins) are used as templates to generate structurally complementary, sequence-specific cavities in a polymerisable matrix; the cavities can then specifically capture (denatured) proteins which have the appropriate primary amino acid sequence [ProteinPrint™, Aspira Biosystems].

[0392] Another methodology which can be used diagnostically and in expression profiling is the ProteinChip® array [Ciphergen], in which solid phase chromatographic surfaces bind proteins with similar characteristics of charge or hydrophobicity from mixtures such as plasma or tumour extracts, and SELDI-TOF mass spectrometry is used to detection the retained proteins. The ProteinChip® is credited with the ability to identify novel disease markers. However, this technology differs from the protein arrays under discussion here since, in general, it does not involve immobilisation of individual proteins for detection of specific ligand interactions.

[0393] Large-scale functional chips have been constructed by immobilising large numbers of purified proteins and used to assay a wide range of biochemical functions, such as protein interactions with other proteins, drug-target interactions, enzyme-substrates, etc. Generally they require an expression library, cloned into E. coli, yeast or similar from which the expressed proteins are then purified, e.g. via a His tag, and immobilised. Cell free protein transcription/translation is a viable alternative for synthesis of proteins which do not express well in bacterial or other in vivo systems.

[0394] For detecting protein-protein interactions, protein arrays can be in vitro alternatives to the cell-based yeast two-hybrid system and may be useful where the latter is deficient, such as interactions involving secreted proteins or proteins with disulphide bridges. High-throughput analysis of biochemical activities on arrays has been described for yeast protein kinases and for various functions (protein-protein and protein-lipid interactions) of the yeast proteome, where a large proportion of all yeast open-reading frames was expressed and immobilised on a microarray. Large-scale ‘proteome chips’ promise to be very useful in identification of functional interactions, drug screening, etc. [Proteometrix]. Another possible screen will be for the effect of polymorphisms arising from disease-related coding SNPs (SAPs, single amino acid polymorphisms); such information may be valuable in ascertaining the effects of SNPs on drug responses and side effects in patients (pharmacogenomics). One restriction is that proteins which are only functional as multicomponent complexes will probably not be analysable on protein arrays.

[0395] As a two-dimensional display of individual elements, a protein array can be used to screen phage or ribosome display libraries, in order to select specific binding partners, including antibodies, synthetic scaffolds, peptides and aptamers. In this way, ‘library against library’ screening can be carried out. Screening of drug candidates in combinatorial chemical libraries against an array of protein targets identified from genome projects is another application of the approach.

[0396] (5) Multiplexed Bead Assay

[0397] A multiplexed bead assay, such as for example the BD™ Cytometric Bead Array, is a series of spectrally discrete particles that can be used to capture and quantitate soluble analytes. The analyte is then measured by detection of a fluorescence-based emission and flow cytometric analysis. Multiplexed bead assay generates data that is comparable to ELISA based assays, but in a “multiplexed” or simultaneous fashion. Concentration of unknowns is calculated for the cytometric bead array as with any sandwich format assay, i.e. through the use of known standards and plotting unknowns against a standard curve. Further, multiplexed bead assay allows quantification of soluble analytes in samples never previously considered due to sample volume limitations. In addition to the quantitative data, powerful visual images can be generated revealing unique profiles or signatures that provide the user with additional information at a glance.

[0398] (6) Magnetic Capture

[0399] Antibody-coated magnetic particles can be used to capture and selectively separate target cells or specific chemicals from solution. In the technique, target-specific antibody is bound to a magnetic particle (often termed an immunobead). After reaction time to allow binding of immunobead and target, a strong magnetic field is applied to selectively separate the captured target-particle complexes from the milieu.

[0400] (7) Imunocytochemistry/Immunohistochemistry

[0401] Also provided are methods of detecting a substance of interest such as a protein, such as FVIII subtypes, in vivo or in situ using antibody conjugates. Imunocytochemistry and immunohistochemistry are techniques for identifying cellular or tissue constituents, respectively, by means of antigen-antibody interactions. The methods generally involve administering to an animal or subject an imaging-effective amount of a detectably-labeled protein-specific antibody or fragment thereof, and then detecting the location of the labeled antibody in the sample cell or tissue. An “imaging effective amount” is an amount of a detectably-labeled antibody, or fragment thereof, that when administered is sufficient to enable later detection of binding of the antibody or fragment in the specific cell or tissue. The effective amount of the antibody-marker conjugate is allowed sufficient time to come into contact with reactive antigens that are present within the tissues of the subject, and the subject is then exposed to a detection device to identify the detectable marker.

[0402] Administration of the antibodies can be done as disclosed herein. Nucleic acid approaches for antibody delivery also exist. The antibodies and antibody fragments disclosed herein can also be administered to patients or subjects as a nucleic acid preparation (e.g., DNA or RNA) that encodes the antibody or antibody fragment, such that the patient's or subject's own cells take up the nucleic acid and produce and secrete the encoded antibody or antibody fragment. The delivery of the nucleic acid can be by any means, as disclosed herein, for example. Administration of the antibody can be local or systemic and accomplished intravenously, intra-arterially, via the spinal fluid or the like. Administration also can be intradermal or intracavitary, depending upon the body site under examination. After a sufficient time has lapsed for the labeled antibody or fragment to bind to the diseased tissue, for example 30 minutes to 48 hours, the area of the subject under investigation can then be examined by an imaging technique, such as those described herein.

[0403] The distribution of the bound radioactive isotope and its increase or decrease with time can be monitored and recorded. By comparing the results with data obtained from studies of clinically normal individuals, the presence and extent of the diseased tissue can be determined.

[0404] The exact imaging protocol will necessarily vary depending upon factors specific to the subject, and depending upon the body site under examination, method of administration, type of label used and the like. One of ordinary skill in the art will be able to determine which imaging protocol to use based on these factors. Effective dosages and schedules for administering the compositions can be determined empirically, and making such determinations is within the skill in the art. The dosage ranges for the administration of the compositions are those large enough to produce the desired effect in which the symptoms of the disorder are affected. The dosage should not be so large as to cause adverse side effects, such as unwanted cross-reactions, anaphylactic reactions, and the like. Generally, the dosage will vary with the age, condition, sex and extent of the disease in the patient, route of administration, or whether other drugs are included in the regimen, and can be determined by one of skill in the art. The dosage can be adjusted by the individual physician in the event of any counter indications. Dosage can vary, and can be administered in one or more dose administrations daily, for one or several days. Guidance can be found in the literature for appropriate dosages for given classes of pharmaceutical products. For example, guidance in selecting appropriate doses for antibodies can be found in the literature on therapeutic uses of antibodies, e.g., Ferrone et al., Handbook of Monoclonal Antibodies, (1985) ch. 22 and pp. 303-357; Haber et al., Antibodies in Human Diagnosis and Therapy, (1977) pp. 365-389. A typical daily dosage of the antibody used alone might range from about 1 μg/kg to up to 100 mg/kg of body weight or more per day, depending on the factors mentioned above.

[0405] 3. Methods of Factor Inhibitor Detection (Bethesda Assay)

[0406] Inhibitor to Factor VIII is screened for by mixing test plasma with a known amount of Factor VIII. After a 2 hour incubation period at 37° C., the residual Factor VIII activity is determined in a factor VIII assay. By comparing the difference in the Factor VIII activity of the patient incubation mixture and a control mixture, the absence or presence of a Factor VIII inhibitor can be demonstrated. Some antibodies will only prolong the Protein Truncation Test (PTT) after incubation. The assay disclosed herein can utilize blood plasma that contains only one of the 6 wildtype form of FVIII protein.

[0407] Factor VIII inhibitors, IgG antibodies directed against factor VIII, can occur in alloimmunized patients with congenital factor VIII deficiency (Hemophilia A) or as autoantibodies. The latter are associated with pregnancy, autoimmune disease, or drugs but most often occur spontaneously, particularly among elderly persons.

[0408] General steps involved in a Bethesda assay for factor VIII inhibitor include: Serial subject plasma dilutions in citrated saline are prepared, from 1:1 up to 1:160 (or higher if necessary for high-titer factor inhibitors). The purpose of these dilutions is to dilute out the inhibitor. The patient plasma dilutions are then mixed with an equal volume of normal plasma containing a normal amount of coagulation factors. The mixed dilutions are usually incubated for up to 2 hours, because certain inhibitors show an inhibitory effect only after prolonged incubation (particularly factor V and factor VIII inhibitors). Factor VIII assays are then performed on each mixed dilution. The dilution that inhibits 50% of factor VIII in the assay defines the titer of the inhibitor. For example, if the 1:40 dilution inhibits 50% of the factor VIII in the assay, the patient is reported to have a titer of 40 BU of factor VIII inhibitor.

[0409] Porcine factor VIII can be substituted for normal plasma (which contains human factor VIII) in the Bethesda assay to determine if the factor VIII inhibitor cross-reacts with porcine factor VIII. If there is little or no cross-reactivity, porcine factor VIII is often used to treat bleeding due to a factor VIII inhibitor.

[0410] The Bethesda assay can be modified to identify and titer other specific factor inhibitors. For example, if a factor V inhibitor is suspected, factor V assays are performed on the mixed dilutions instead of factor VIII assays.

[0411] Antibodies that inhibit the activity of a specific coagulation factor can develop spontaneously or in association with certain medications, autoimmune diseases, or other conditions. These antibodies may also arise when a patient with a hereditary factor deficiency is transfused with a product containing the factor, such as a factor concentrate or fresh frozen plasma. The immune system in the patient with the deficiency views the transfused factor as foreign, and forms an antibody against the transfused factor. This complication makes treatment of bleeding episodes difficult in such patients. The most common clinically significant factor inhibitor is a factor VIII inhibitor. Factor VIII inhibitors cause decreased factor VIII activity and consequently a prolonged PTT. Factor VIII inhibitors exhibit a characteristic pattern in the PTT mixing study where the mixed plasma PTT is initially normal (or significantly more normal than the patient plasma's PTT) but becomes prolonged (typically by increasing at least 8-10 seconds) over the course of a 1- to 2-hour incubation.

Use of the Haplotype-Specific Bethesda Assay in Patients with Acquired Hemophilia A

[0412] When a non-hemophilic patient presents with bleeding, whether or not it is reminiscent of hemorrhagic episodes seen in hemophilia patients, they undergo a diagnostic evaluation for identifying the common acquired bleeding disorders via testing performed in the Clinical Hemostasis Laboratory. Inhibitors are usually first detected using a sensitive clotting-based assay, variably referred to as an inhibitor screen or a mixing study. If a coagulation factor inhibitor is suspected from the results of the screening assay, the specificity of these antibodies (i.e., anti-FVIII- vs anti-FIX- vs anti-FV- vs anti-vWF-antibodies) is usually determined by performing clotting-based assays that are specific for the different coagulation factors. Once the presence and specificity of the suspected inhibitor has been determined, their presence and specificity are most often confirmed by performing the more specific clotting-based test known as the Bethesda assay. The plasma level (i.e. titer) of an inhibitor, likewise, is typically measured by the Bethesda assay and is defined in terms of Bethesda units (BU).

[0413] While use of the traditional Bethesda assay, as described above, can confirm the specificity of an inhibitor as recognizing FVIII, and not another coagulation factor, because it is based on pooled normal plasma as the “wildtype FVIII source”, one cannot determine the specificity of the inhibitor towards the six structurally-distinct forms of the wildtype FVIII protein expressed by humans. Using the Haplotype-Specific Bethesda assay disclosed herein, the reactivity of the auto-FVIII antibodies can be specifically evaluated in a patient with acquired hemophilia A, towards the different forms of the human FVIII protein. These autoantibodies, by definition, should be directed against the patient's own (i.e. “self”) FVIII molecule(s). Acquired hemophilia A, in contrast to the congenital form, affects both males and females, although it has been observed more frequently in women then men. Since females have two X-chromosomes and therefore two F8, the wildtype FVIII protein they express may all represent the same wildtype form (i.e. haplotype) or two distinct haplotypes of the protein. Therefore, the autoanti-FVIII antibodies in female patients with acquired hemophilia A may represent either one, or at most two, of the six naturally-occurring forms of the human FVIII. After determining the FVIII haplotype(s) in a patient with acquired hemophilia A, the disclosed Haplotype-Specific Bethesda assay can be used to determine the haplotype(s) against which their antoanti-FVIII antibodies are reactive. If a given patient's inhibitors are directed against only their own endogenous FVIII molecule(s), or react with one or more of the other forms of the wildtype FVIII protein less then with their own, this Bethesda assay can be used to provide them with the most appropriate replacement FVIII product (i.e., the FVIII haplotype least reactive with their serum).

[0414] a) Detection and Quantification of Inhibitors

[0415] Factor replacement therapy, the intravenous infusion of concentrated, purified preparations of either recombinant (r) or plasma-derived (p) wildtype human FVIII, is the most widely used and effective means of arresting and/or preventing bleeding in patients with hemophilia A. Unfortunately, the exogenous FVIII protein is seen as a foreign in ˜25% of patients and becomes targeted by functionally neutralizing alloantibodies, termed inhibitors. Because inhibitors can leave patients refractory to further treatment with FVIII, and necessitate the use of alternative therapies that are less desirable from a clinical and economic standpoint, the development of such antibodies is considered to be the most serious complication in the management of hemophilia A. Therefore, all patients with hemophilia A should be periodically tested for the presence of inhibitors.

[0416] Different methods have been used to detect and quantify inhibitors, as well as non-inhibitory anti-FVIII antibodies. Typically, however, a traditional Bethesda assay, with or without the Njiemegan modification, has been performed on all hemophilia A patients testing positive in an a PTT-based plasma mixing study, which are often referred to as an inhibitor screen. Dilutions of a patient's plasma is then mixed with a pooled normal plasma (PNP), which is derived from a large collection of healthy unrelated blood donors and therefore contains wildtype FVIII, and incubated at 37° C. for two hours. At the end of the two hours, a FVIII activity (FVIII:C) assay is performed on the mixtures, using a reagent plasma deficient for FVIII:C, so that the amount of residual FVIII:C can be calculated. This method has also been used to detect other factor inhibitors through the use of PNP that has been immunodepleted of the coagulation protein suspected of being the target.

[0417] The Bethesda assay has long been known to have several shortcomings, which include, among others, a poor sensitivity to low-titre antibodies and a poor specificity near the cut-off. While this has been attributed, at least in part, to the complex reaction kinetics of some inhibitors, this needs to be re-investigated in light of the recent discovery that humans express at least six structurally-distinct forms of the wildtype FVIII protein. Since the Bethesda assay uses PNP as the source of FVIII to detect inhibitors in patient plasmas, it is clear that this finding, which demonstrates as inaccurate the long-held view that FVIII is monomorphic at the protein level in the non-hemophilic human population, could account for at least some of the problems associated with the Bethesda assay.

[0418] Assay principle: An inhibitor to FVIII, or more accurately FVIII:C, is quantitated by mixing the patient's plasma, which is known as the test plasma, with a FVIII source plasma, that has typically been a PNP containing a known amount of “wildtype” FVIII:C. After an incubation period, the residual FVIII:C activity level is measured in an aPTT-based specific FVIII activity assay that also requires FVIII deficient plasma. By comparing the difference in FVIII:C levels of the patient incubation mixtures and a control mixture, the amount of inhibitor present can be calculated in Bethesda units (BU's). One BU of inhibitor is defined as the amount of inhibitor that will inactivate 50% of the original FVIII:C level present.

[0419] The novel Haplotype-Specific Bethesda assay incorporates the recent discovery that, due to the presence of four non-synonymous SNPs (nsSNPs) in the FVIII gene (F8), humans express six wildtype forms of the coagulation FVIII protein, referred to as haplotypes H1, H2, H3, H4, H5, and H6. Through the use of immunodepleted FVIII-deficient human plasmas that have been reconstituted with purified recombinant (r) FVIII preparations that represent one of the six forms of the human protein, different homogeneous FVIII source plasmas are available that can be used to maximize the sensitive of this assay in a given patient by testing their plasma for antibodies against only the form of the molecule(s) that they have been treated with. This novel strategy simultaneously increases the specificity of the traditional Bethesda assay, by also testing a patient's plasma against a source plasma containing only the wildtype FVIII protein corresponding to their own background form of the molecule.

[0420] b) Specimen Requirements

[0421] A. Collect patient's blood in two B-D blue-top siliconized Vacutainer tubes containing 0.5 mL of 0.1M buffered sodium citrate (3.2% sodium citrate).

[0422] B. If drawing with a syringe, use a 2-syringe technique, discarding blood in the first syringe or using it for other tests. Blood for test should come from the second syringe.

[0423] C. If using Vacutainer collection, at least one other tube should be collected before collecting tubes for the test.

[0424] D. The collection tube must contain ˜4.5 mL of blood. The plasma-to-anticoagulant ratio is critical. No short-sampled or overfilled tubes will be accepted.

[0425] E. Sample should be brought to the Hemostasis Lab immediately after collection, with time of collection marked on the label. If specimen cannot be delivered to the Lab immediately place on ice. If specimen is on ice for >4 hours, it will not be accepted for testing.

[0426] F. Specimen should be centrifuged immediately with top on tube at 2,500 g for 15 minutes (or adjusted speed/time to provide residual platelets of <10×10⁹/L).

[0427] G. Using plastic dispo pipet, remove platelet-free plasma to plastic 12×75 tubes and cover.

[0428] H. If the assay cannot be performed within 4 hours, the plasma must be frozen at −20° C. (stable for 2 weeks) or −70° C. (stable for 6 months). Frozen plasma must be thawed rapidly in a 37° C. waterbath when ready to perform test.

[0429] I. Severely hemolyzed specimens will not be accepted for testing.

[0430] c) Equipment & Reagents

[0431] A. Equipment:

[0432] Stago-STA or other comparable automated coagulomator

[0433] Centrifuge

[0434] Pipettes

[0435] Pipette tips

[0436] Plastic test tubes

[0437] Cuvette roll (contains 1000 STA cuvettes)

[0438] Magnetic stir bars

[0439] Bar-coded Information sheet

[0440] Reagent grade water

[0441] B. Reagents:

1. STA-Neoplastine-CI-Plus® Reagent (extrinsic pathway factor inhibitors)
a. Reagent 1: STA-Neoplastin-CI-Plus® thromboplastin prepared from fresh rabbit cerebral tissues. The ISI value of this reagent is determined against a secondary standard known as the BCT (British comparative thromboplastin), and is indicated in the bar-code insert provided in the box.
b. Reagent 2: Solvent containing calcium with sodium azide as a preservative, 10 mL per vial.
c. Transfer reagent 2 into the vial of reagent 1 of same lot #. Swirl gently to obtain a homogeneous suspension. Keep the reconstituted reagent in the original vial and allow it to stand at room temperature (18-25° C.) for 30 minutes before use.
d. Before placing the reagent on the instrument, remove rubber stopper, add a stir bar to the vial, and install the perforated plastic cap on the vial. The mixed reagent is stable 48 hours on the STA. Do not freeze.
2. PTT-A (intrinsic pathway factor inhibitors): reconstitute each vial with 5 mL of distilled water. Allow the reconstituted material to stand at room temperature for 30 minutes. Swirl the reagent gently, place a magnet inside, and install the perforated plastic cap on the vial. Vortex bottle before use. Stable for 24 hours on the STA. Do not freeze.
3. CaCL₂ (0.025M); no reconstitution necessary. Stable for 5 days on the STA.
4. Sterile, filtered, distilled water.
5. Imidazole buffered saline: weigh in a 1 L volumetric flask 3.4 g imidazole and 5.85 g sodium chloride; add 186 mL 0.1N hydrochloric acid, until pH is at 7.3 and qs to 1 L with sterile water. The solution is stored at 2-8° C.
6. 0.1N HCl; measure 8.3 mL concentrated hydrochloric acid into a 1000 mL flask (volumetric) and qs to 1000 mL with sterile water. The solution is stored at 2-8° C.
7. Pooled normal plasma: George King pooled normal plasma-(unassayed)-George King Biomedical. Store frozen at −70° C. Thaw rapidly in 37° C. waterbath, vortex and keep cold until use.
8. Recombinant haplotype 1 human factor VIII (r-hFVIII-H1): dissolve a bottle of lyophilized r-hFVIII-H1 to a final concentration of 20 Units/mL with sterile filtered water. Example: if the concentration on the bottle is 475 Units (may vary)
[0442] X mL=475 Units=23.75 mL
[0443] 20 Units/mL
[0444] X=volume of sterile water to add to bottle to achieve 20 Units/mL
   Distribute the reconstituted r-hFVIII-H1 via 125 μL aliquots into labeled cyrovials and freeze at −70° C. Stable indefinitely under this storage condition. Thaw for 5 minutes at 37° C. in a waterbath immediately prior to using.
   9. R-hFVIII-H1 plasma (1 Unit/mL): make this working solution by adding 50 μL of the stock r-hFVIII-H1 solution (20 Units/mL) to 950 μL of immunodepleted FVIII deficient human plasma (i.e., NoFact-VIi; R²-Diagnostics, South Bend, Ind.; see below).
   10. Recombinant haplotype 2 human factor VIII (r-hFVIII-H2): repeat procedure in step 8 above to reconstitute a vial of lyophylized r-hFVIII-H2 at 20 Units/mL
   11. R-hFVIII-H2 plasma (1 Unit/mL): repeat procedure in step 9 above to prepare a working solution of r-hFVIII-H2 (20 Units/mL)
   12. Repeat steps 8 and 9 individually four more times to prepare identical working solutions (20 Units/mL) of r-FVIII proteins representing the 4 additional haplotypic forms, H3, H4, H5 and H6, of the wildtype human FVIII protein (i.e., r-hFVIII-H3, r-hFVIII-H4, r-hFVIII-H5 and r-hFVIII-H6).
   13. NoFact-VIIIi: immunodepleted FVIII-deficient plasma. Reconstitute each vial of NoFact-VIIIi FVIII-deficient plasma with 1.0 mL distilled water. Swirl gently and allow to stand for 20 minutes at room temperature. Stable 8 hours at 2-6° C.

### d) Controls

[0445] A. System-N (normal): reconstitute with 1 mL of reagent grade water. Let sit for 30 minutes. Mix well. DO NOT INVERT. Stable for 8 hours on the STA.

[0446] B. System-P (abnormal): reconstitute in 1 mL of reagent grade water. Let sit 30 minutes. Mix well. DO NOT INVERT. Stable for 8 hours on the STA. System-N and -P are normal and abnormal controls that are set up to run automatically at 8-hour intervals. These should be performed at least once per shift if testing is performed. System-N and -P must be run any time that new reagent is made up. Control results are filed in the instrument's QC file automatically.

[0447] All results for a 24-hour period will be reduced to a “mean” at midnight. This mean is used in the statistical data and is plotted on the Levy-Jennings chart.

[0448] C. Quality Control will automatically be run when a new calibration curve has been requested. If using a stored curve, the STA will automatically run QC if the patient samples have been loaded. QC can also be ordered manually before loading patient samples.

[0449] D. All control ranges are monitored automatically by the STA. If any controls are outside the ±2SD range, the STA will audibly and visually alarm the operator. Otherwise, the results can be found in the AUTO CONTROL file and the individual QC files. Control results are automatically filed in the STA QC file. All results for a 24-hour period will be reduced to a “mean” value at midnight. This mean is used in the statistical data and is plotted on the Levy-Jennings chart as a daily mean.

### e) Procedure

[0450] A. Dilute patient plasma in 12×75 plastic tubes with imidazole buffered saline as follows:

TABLE 1
Patient plasma dilution series.

| Dilution | Patient Plasma Dilution Series |
|---|---|
| 1:2 | 500 μL patient plasma + 500 μL imidazole buffered saline |
| 1:4 | 500 μL of 1:2 patient dilution + 500 μL imidazole buffered |
| | saline |
| 1:8 | 500 μL of 1:4 patient dilution + 500 μL imidazole buffered |
| | saline |
| 1:16 | 500 μL of 1:8 patient dilution + 500 μL imidazole buffered |
| | saline |
| 1:32 | 500 μL of 1:16 patient dilution + 500 μL imidazole buffered |
| | saline |
| 1:64 | 500 μL of 1:32 patient dilution + 500 μL imidazole buffered |
| | saline |
| 1:128 | 500 μL of 1:64 patient dilution + 500 μL imidazole buffered |
| | saline |
| 1:256 | 500 μL of 1:128 patient dilution + 500 μL imidazole buffered |
| | saline |
| 1:512 | 500 μL of 1:256 patient dilution + 500 μL imidazole buffered |
| | saline |

[0451] B. To perform a haplotype-specific Bethesda assay, the following patient-specific medical history information must first be obtained or determined:

[0452] 1. The wildtype FVIII background (H1, H2, H3, H4, H5, or H6) within which a patient's F8 mutation arose, and

[0453] 2. Which FVIII replacement product(s) the patient has been administered. Currently there are 3 structurally-distinct r-FVIII proteins that are commercially available for clinical use in factor replacement therapy: (a) Kogenate (Bayer HealthCare, LLC; Berkeley, Calif.); (b) Recombinate (Baxter Healthcare Corporation; Westlake Village, Calif.); and (c) Refacto (Wyeth/Genetics Institute; St. Louis, Mich.). Kogenate is a full-length B-domain containing r-FVIII molecule that is identical at the amino acid sequence level to the naturally-occurring wildtype form of human FVIII represented by haplotype H1. Recombinate is a full-length, B-domain containing r-FVIII molecule that is identical in amino acid sequence to the naturally-occurring wildtypeform of human FVIII represented by haplotype H2. In contrast to Kogenate and Recombinate, Refacto is a non-naturally-occurring r-FVIII protein that lacks the majority of the B-domain found in the human molecule. Kogenate and Recombinatevary at only 1 amino acid residue, position 1241, i.e. the site of a naturally-occurringbiallelic polymorphisms, D1241E, which is encoded by 1 (C92714G) of the 4 nsSNPsfound in the human F8. Since Refacto lacks the B-domain, the location of D1241E, and has the same allele as Recombinate and Kogenate at the three additional nsSNP sites (i.e., R484H, R776G and M2238V), are referred to as representing a hybrid haplotype designated H1/H2.

[0454] 3. In microvials, make the necessary number of incubation mixes between immunodepleted FVIII-deficient human plasmas, which have first been reconstituted to contain a homogenous population of r-FVIII molecules that represent only 1 of the 6 naturally-occurring forms of the wildtype human protein (i.e., H1, H2, H3, H4, H5, or H6), and a dilution series of the patient's plasma (see tables 2 & 3 below). For any given patient, this will require the preparation of at least one r-FVIII working solution, which contains the form of the protein represented by what the patient has been treated with.

[0455] If, for example, a patient has only been treated with Kogenate (i.e., H1) and his background FVIII haplotype is H1, only 1 reconstituted plasma working solution is prepared (i.e., FVIII-deficient human plasma containing 1 U/mL of r-hFVIII-H1) and used to prepare the 11 incubation mixtures with the patient's plasma as shown in Table 2 below.

[0456] If, however, the background haplotype of a patient, who, like the previous patient, has received only Kogenate, is H3, two reconstituted plasma working solutions must be prepared: (a) FVIII-deficient human plasma containing 1 U/mL of r-hFVIII-H1, as before; and (b) and FVIII-deficient human plasma containing 1 U/mL of r-hFVIII-H3 (to serve as a control). Testing in this patient requires that both of these FVIII working solutions would be used to prepare the 11 incubation mixtures with the patient's plasma as shown in Tables 2 and 3 below. In this case, the mixture of patient's plasma and the FVIII molecule corresponding structurally to what he has been treated with (r-hFVIII-H1), serves as the test mixture.

[0457] The test FVIII incubation mixtures for the patient discussed in the above example, would be prepared, as shown in table X below, by mixing 200 μL of the reagent FVIII-deficient human plasma (No-FactVIIIi)¹, that has first been reconstituted with r-hFVIII-H1 at 1 Unit/mL, with either 200 μL of non-diluted patient's plasma or 200 μL of the patient's plasma that has first been diluted imidazole buffered saline (see Table 1) as shown.

TABLE X
Test incubation mixtures for 1^{st} & 2^{nd} example patients described above.

| Tube | Test Incubation Mixtures |
|---|---|
| (—)- | 200 μL normal pooled plasma + 200 μL imidazole buffer saline |
| control | |
| 1:1 | 200 μL human plasma (r-hFVIII-H1) + 200 μL patient's non- |
| | diluted plasma |
| 1:2 | 200 μL human plasma (r-hFVIII-H1) + 200 μL patient's 1:2 |
| | plasma dilution |
| 1:4 | 200 μL human plasma (r-hFVIII-H1) + 200 μL patient's 1:4 |
| | plasma dilution |
| 1:8 | 200 μL human plasma (r-hFVIII-H1) + 200 μL patient's 1:8 |
| | plasma dilution |
| 1:16 | 200 μL human plasma (r-hFVIII-H1) + 200 μL patient's 1:16 |
| | plasma dilution |
| 1:32 | 200 μL human plasma (r-hFVIII-H1) + 200 μL patient's 1:32 |
| | plasma dilution |
| 1:64 | 200 μL human plasma (r-hFVIII-H1) + 200 μL patient's 1:64 |
| | plasma dilution |
| 1:128 | 200 μL human plasma (r-hFVIII-H1) + 200 μL patient's |
| | 1:128 plasma dilution |
| 1:256 | 200 μL human plasma (r-hFVIII-H1) + 200 μL patient's |
| | 1:256 plasma dilution |
| 1:512 | 200 μL human plasma (r-hFVIII-H1) + 200 μL patient's |
| | 1:512 plasma dilution |

¹No-FactVIIIi is generated by FVIII-immunodepletion of pooled normal human plasma

TABLE Y
Control incubation mixtures for 2^{nd} example patient described above.

| Tube | Control Incubation Mixtures |
|---|---|
| (—)- | 200 μL normal pooled plasma + 200 μL imidazole buffer saline |
| control | |
| 1:1 | 200 μL human plasma (r-hFVIII-H3) + 200 μL patient's non- |
| | diluted plasma |
| 1:2 | 200 μL human plasma (r-hFVIII-H3) + 200 μL patient's 1:2 |
| | plasma dilution |
| 1:4 | 200 μL human plasma (r-hFVIII-H3) + 200 μL patient's 1:4 |
| | plasma dilution |
| 1:8 | 200 μL human plasma (r-hFVIII-H3) + 200 μL patient's 1:8 |
| | plasma dilution |
| 1:16 | 200 μL human plasma (r-hFVIII-H3) + 200 μL patient's 1:16 |
| | plasma dilution |
| 1:32 | 200 μL human plasma (r-hFVIII-H3) + 200 μL patient's 1:32 |
| | plasma dilution |
| 1:64 | 200 μL human plasma (r-hFVIII-H3) + 200 μL patient's 1:64 |
| | plasma dilution |
| 1:128 | 200 μL human plasma (r-hFVIII-H3) + 200 μL patient's |
| | 1:128 plasma dilution |
| 1:256 | 200 μL human plasma (r-hFVIII-H3) + 200 μL patient's |
| | 1:256 plasma dilution |
| 1:512 | 200 μL human plasma (r-hFVIII-H3) + 200 μL patient's |
| | 1:512 plasma dilution |

[0458] C. Mix the incubation mixtures, cap vials, place in the 37° C. waterbath and incubate for 2 hours.

[0459] D. At the end of 2 hours, perform the FVIII assay on the control tubes, the tube with the 1:1 dilution and the tube with the 1:2 dilution, on the STA as follows:

[0460] 1. Refer to the START-UP procedure for the STA before running patient samples on the STA at the start of each shift.

[0461] 2. Request quality control if using a stored curve: through the MAIN MENU under CALIB/CONTROL select QUALITY CONTROL and enter. Cursor to the selected factor assay(s) and select by pressing F1 and then F10 to run the QC.

[0462] 3. Load patient samples: access the sample drawer(s) through the MAIN MENU under LOADING. After the drawer opens, identify the type of specimen, such as micro sample, with F8, or STAT, with F12. Identify the sample by bar-coding or manually entering on the keyboard the patient identification number and then placing the sample into the drawer.

[0463] 4. In MANUAL MODE, the operator must order the test from the menu. Select the factor that has a ×10 dilution. Press F10 to save.

[0464] 5. As soon as the sample drawer closes, the TEST STATUS screen will appear. If there is not enough reagent(s) to run the test, the suspect reagent(s) will appear in red with the amount of deficiency. This deficiency will BLOCK the sample pipettor. When this occurs, add the deficient reagent(s) to run the samples.

[0465] 6. All dilutions of the calibrator, controls and patient samples are automatically prepared by the STA according to the parameters entered in the Test Set-up. If the patient results fall outside the assay range, the STA automatically re-tests the sample in question at an appropriate dilution provided that the option has been entered in the Test Set-up.

[0466] 7. All patient results are displayed on the TEST PANEL screen and automatically print out and transmit if selected.

[0467] 8. For results in question that need operator intervention, cursor to the identification number in the TEST PANEL screen and enter. This will bring up the FILE PROCESSING screen. Follow the options in the left-hand corner of the screen, i.e. re-run test.

### 1) Procedural Notes

[0468] A. Calculate the residual FVIIII:C activity of each patient dilution incubation mixture by using the following calculations:

$$Residual FVIII \text{:} C activity = \frac{Factor VIII \text{:} C Activity ( Patient )}{Factor VIII \text{:} C Activity ( Control )} \times 100$$

[0469] B. If the residual FVIII:C activity level is <75%, the residual FVIII:C activity is converted to a Bethesda unit factor using the following chart and calculation:

| Bethesda Factor | Residual FVIII:C Level | Bethesda Units |
|---|---|---|
| Chart: | 75% | 0.40 |
| | 73% | 0.45 |
| | 70% | 0.50 |
| | 68% | 0.55 |
| | 66% | 0.60 |
| | 64% | 0.65 |
| | 61% | 0.70 |
| | 59% | 0.75 |
| | 57% | 0.80 |
| | 55% | 0.85 |
| | 53% | 0.90 |
| | 51% | 0.95 |
| | 50% | 1.00 |
| | 48% | 1.05 |
| | 46% | 1.10 |
| | 45% | 1.15 |
| | 43% | 1.20 |
| | 42% | 1.25 |
| | 41% | 1.30 |
| | 40% | 1.35 |
| | 38% | 1.40 |
| | 37% | 1.45 |
| | 35% | 1.50 |
| | 34% | 1.55 |
| | 33% | 1.60 |
| | 32% | 1.65 |
| | 30% | 1.70 |
| | 29% | 1.75 |
| | 28% | 1.80 |
| | 27% | 1.85 |
| | 26% | 1.90 |
| | 25% | 2:00 |

[0470] C. If the residual FVIII:C activity is >75% of the control value in the 1:1 dilution tube and the 1: dilution tube, report out <1.0 Bethesda unit.

[0471] D. Perform the following calculation to determine Bethesda units/mL plasma of inhibitor present using the residual FVIII:C value closest to 50% of the control value.

### 1. Calculation:

[0472] Bethesda units×Dilution factor from chart=FVIII:C inhibitor in factor from chart of patient plasma used to Bethesda units/mL determine residual FVIII:C plasma

DILUTION FACTOR CHART

| Dilution of Patient Plasma | Dilution Factor |
|---|---|
| 1:1 | 1 |
| 1:2 | 2 |
| 1:4 | 4 |
| 1:8 | 8 |
| 1:16 | 16 |
| 1:32 | 32 |
| 1:64 | 64 |
| 1:128 | 128 |
| 1:256 | 256 |
| 1:512 | 512 |

### 2. Example:

[0473] Control FVIII:C level=50%
Patient FVIII:C level on 1:4 dilution=25%

$$\begin{matrix}Residual FVIII level = \frac{25}{50} \times 100 \% \\ = 50 \%\end{matrix}$$

50% in Bethesda units (BU) from Bethesda factor chart (chart B)=1.0 BU

1.0 BU×4 (patient dilution)=4.0BU (final result)

[0474] E. If the residual FVIII:C activity falls below 25%, the test must be repeated using higher dilutions of patient plasma until at least one value of greater than 25%, residual FVIII:C activity is obtained.

[0475] F. If more than one dilution falls between the 25% and 75% residual FVIII:C activity range, the final result should be the average of all these results.

[0476] G. To search for weak inhibitors, a >ratio of patient to pooled normal plasma can be used in the incubation mixture. If 1 part pooled normal plasma and one part patient plasma do not give a satisfactory result, increase the amount of patient plasma to pooled normal plasma: add 0.5 mL patient plasma to 0.1 mL pooled normal plasma and incubate 2 hours at 37° C. At the end of the 2 hour incubation, perform a FVIII:C assay on the specimen and calculate the %-residual activity as before. Determine the Bethesda unit as before. Divide the Bethesda units obtained by 5 to obtain the Bethesda units actually present in the patient plasma.

### g) Result Reporting

[0477] A. If residual FVIII:C activity level is greater than 75%, report as: No inhibitor present (Bethesda units<1.0).

[0478] B. If residual FVIII:C activity level is 75% or less, report as: inhibitor present (Bethesda units/mL of plasma).

### h) Interpretation

[0479] One Bethesda unit is described as the concentration of an antibody which produces a residual FVIII:C of 50%, in a precisely controlled incubation mixture that is maintained at 37° C. for 2 hours. It is stated as 1 unit of inhibitor/mL of plasma. This method is primarily intended for use in measuring inhibitors that occur in hemophiliacs. Very weak inhibitors may not be detected by this method. Nearly all patients in whom inhibitors develop have severe hemophilia A (FVIII:C of <1%). In most patients, the antibody persists for years and there is an anamnestic response after transfusion. As the inhibitor titer increases, the patient usually becomes less responsive to replacement therapy. In some patients, the antibody titer remains low and does not increase after replacement therapy. FVIII:C inhibitors occasionally develop in non-hemophiliacs who have previously received transfusions. If weak inhibitors can be detected and quantitated, then the course of such inhibitors can be evaluated and related to such factors as blood product therapy. In some patients, inhibitor strength progress' from the barely detectable to the potent. Some patients with potent inhibitors who are not exposed further to blood products may have barely detectable inhibitors later.

The following references are herein incorporated by reference in their entireties:
[0480] A. Children's Hospital Medical Center, Los Angeles, Calif.
[0481] B. Kasper, Carol K. and Pool, Judith G., Measurement of mild inhibitors in Bethesda Units. Thrombosis et. Diathesis: Haemorrhagia. 1975, Vol. 34, p. 875.
[0482] C. Kasper, Carol K. and Pool, Judith G., et al. A More Uniform Measurement of Factor VIII Inhibitors. Thrombosis et. Diathesis: Haemorrhagica. 1975 Vol. 34, p. 869.
[0483] D. Thomson, Jean M., ed. Blood Coagulation and Haemostasis: A Practical Guide. 2nd ed., Edinburgh, Great Britain, 1980, pp. 82-82.
[0484] E. Triplett, Douglas A., ed. Laboratory Evaluation of Coagulation. 1st ed., Chicago, Ill., 1981, pp. 128-129.
[0485] F. Triplett, Douglas A., and Harms, Cathy S. Procedures for the Coagulation Laboratory. Chicago, Ill., 1981, pp. 71-75.
[0486] G. Lusher, J., Abildgaard, C., Arkin, S., Mannucci, P. M., Zimmermann, R., Schwartz, L., Hurst, D. Human recombinant DNA-derived antihemophilic factor in the treatment of previously untreated patients with hemophilia A: final report on a hallmark clinical investigation. J. Thromb. Haemost. 2(4):574-83, 2004.
[0487] H. Lindgren, A., Wadenvik, H., and Tengborn, L. Characterization of inhibitors to FVIII with an ELISA in congenital and acquired haemophilia A. Haemophilia. 8(5):644-648, 2004.

[0488] 4. Methods of Genetic Testing

[0489] Rapid-cycle polymerase chain reaction (PCR) with an allele-specific fluorescent probe can be used for SNP genotyping. High-resolution amplicon melting curve analysis can be used for SNP genotyping. Fluorescent resonance energy transfer (FRET) hybridization probes for detection of the base changes (Lyon Molecular Diagnosis 1998 3:203, herein incorporated by reference) can also be used for SNP genotyping.

[0490] a) Lightcycler®

[0491] (1) Method

[0492] A method for determining a subject haplotype can combine a rapid-cycle polymerase chain reaction (PCR) with an allele-specific fluorescent probe melting for mutation detection. This method combined with rapid DNA extraction, can generally provide results within 60 min after receiving a blood sample. This method allows for easy, reliable, and rapid detection of a polymorphism, and is suitable for typing both small and large numbers of DNA samples.

[0493] The LightCycler® system enables the detection of single nucleotide polymorphisms. It combines PCR amplification and detection into a single step. The platform enables the real-time detection of a specific PCR product followed by melting curve analysis of hybridization probes. The technology is based on the detection of two adjacent oligonucleotide probes, whose fluorescent labels communicate through fluorescence resonance energy transfer (FRET). The molecular concept of single nucleotide polymorphism (SNP) detection is as follows: one of the probes serves as a tightly bound anchor probe and the adjacent sensor probe spans the region of sequence variation. During the melting of the final PCR product, the sequence alteration is detected as a change in the melting temperature of the sensor probe. For a typical homozygous wild type sample, a single melting peak is observed; for mixed alleles, two peaks are observed; and for a homozygous mutated sample, a single peak at a temperature different from the wild type allele is observed. The temperature shift induced by one mismatched base is usually between 5 and 9° C. and easily observable.

[0494] The FVIII haplotyping assay allows the rapid detection and genotyping of four non-synonymous single nucleotide polymorphisms (nsSNPs) of the (G to A at cDNA position 1508, A to G at cDNA position 2383, G to C at cDNA position 3780, and A to G at cDNA position 6769), from DNA isolated from human whole peripheral blood. The test can be performed on the LightCycler® Instrument utilizing polymerase chain reaction (PCR) for the amplification of F8 DNA recovered from clinical samples and fluorigenic target-specific hybridization for the detection and genotyping of the amplified F8 DNA. Disclosed are oligonucleotides comprising cDNA sequences for each haplotype: H1 (SEQ ID NO: 7), H2 (SEQ ID NO: 8), H3 (SEQ ID NO: 9), H4 (SEQ ID NO: 10), H5 (SEQ ID NO: 11), H6 (SEQ ID NO: 12).

[0495] The FVIII haplotyping test is an in vitro diagnostic test for the detection and genotyping of four non-synonymous human F8 SNPs—which have common minor alleles conferring the amino acid substitutions R484H, R776G, E1241D and M2238V—whose naturally-occurring allelic combinations (i.e., haplotypes H1, H2, H3, H4, H5, and H6) encode six structurally distinct wildtype forms of the human FVIII protein. Because only two of these haplotypes, H1 and H2, are represented by the currently available recombinant1 and plasma-derived2 FVIII preparations used clinically, the FVIII haplotyping test will aid physicians select matched3 FVIII replacement products that reduce the frequency at which their hemophilia A patients develop FVIII inhibitors and immunologic refractoriness to replacement therapy.

[0496] Use of the FVIII haplotyping test as a component assay in laboratory algorithms for thrombophilia evaluation, can improve the diagnostic accuracy of thrombosis risk assessment, since the findings of recent genetic studies have demonstrated that the alleles of at least one of the these four nsSNPs F8 (i.e., D1241E) are functionally distinct and influence circulating FVIII levels. For example, because individuals with the E-allele (protein level; or G at the nucleotide level), were found to have an ˜25% lower mean circulating FVIII level, than those with the more prevalent D-allele (protein level; or C at the nucleotide level), this SNP is a determinant of thrombosis risk at the population level. The test is performed on the LightCycler® Instrument (In the EU: serial number 2021 to 5602) using SW 3.5. The sample preparation is performed according to the procedure described below.

[0497] The development of neutralizing alloantibodies to replacement coagulation factor (F)VIII is a serious complication in the management of hemophilia A. The pathogenesis of these antibodies, termed inhibitors, is complex and incompletely understood. Through DNA sequencing, four common nonsynonymous single nucleotide polymorphisms (nsSNPs) were identified in the FVIII genes (F8) from 137 unrelated healthy people representing seven ethnic groups and identified. The naturally-occurring allelic combinations of these four nsSNPs were further found to encode six structurally-distinct wildtype FVIII proteins (haplotypes). This finding that FVIII is not monomorphic in man raises the possibility that structural differences between the background haplotype of a patient's endogenous molecule and the infused wildtype replacement FVIII protein(s) may contribute to the development of inhibitors.

[0498] African American (AA) hemophilia A patients experience a two-fold greater incidence of inhibitors in comparison to Caucasians. African Americans express five haplotypes of FVIII, designated H1, H2, H3, H4 and H5. In contrast, Caucasians express only H1 and H2. The recombinant FVIII molecules in replacement products used clinically have sequence identity with H1 and H2. Similarly, plasma-derived FVIII preparations marketed in the US are essentially highly enriched with the H1 and H2 forms of the protein, because the blood donor population is predominantly Caucasian. The H4 haplotype, expressed by ˜4% of African Americans, is defined by the nsSNP R484H, which is located in an immunodominant epitope within the A2-domain. Two other haplotypes, H3 and H5, which together are expressed in ˜23% of African Americans, have the minor allele of M2238V, a nsSNP in the C2-domain immunodominant epitope. These findings indicate that >25% of African American hemophilia A patients are treated with replacement products containing FVIII molecules which vary from their own at the hemophilic mutation site, and at one or more additional sites, with one always located in an dominant inhibitory epitope.

[0499] The use of this assay can guide hemophilia treaters in selecting FVIII replacement products that are matched as closely as possible to a given patient's endogenous background haplotype, which he will presumably have tolerance to, in order to reduce the frequency of inhibitor development.

[0500] Four fragments of the FVIII gene, referred to as amplicon-1 (189-bp), -2 (161-bp), -3 (151-bp), and -4 (163-bp), are individually amplified in separate PCRs from human genomic DNA using the four pairs of F8 specific primers listed above.

[0501] The amplicons, each of which contain one of the four F8 nsSNPs, are detected by fluorescence using a specific pair of hybridization probes (SEQ ID NOS: 27 & 28 for amplicon 1; SEQ ID NOS: 31 & 32 for amplicon 2; SEQ ID NOS: 35 & 36 for amplicon 3; and SEQ ID NOS: 39 & 40 for amplicon 4). The paired hybridization probes comprise two different oligonucleotides that hybridize to an internal sequence of the amplified F8 fragment during the annealing phase of the PCR cycle. One probe is labeled at the 5′-end with LightCycler Red 640, and to avoid extension, modified at the 3′-end by phosphorylation. The other probe is labeled at the 3′-end with fluorescein.

[0502] Only after hybridization to the template DNA, do the two probes come in close proximity, resulting in fluorescence resonance energy transfer (FRET) between the two fluorophores. During FRET, fluorescein, the donor fluorophore, is excited by the light source of the LightCycler Instrument, and part of the excitation energy is transferred to LightCycler® Red 640, the acceptor fluorophore.

[0503] The emitted fluorescence of LightCycler® Red 640 is then measured by the LightCycler® Instrument.

[0504] Genotyping: The paired hybridization probes are also used to determine the nsSNP genotype contained within the amplicon by performing a melting curve analysis after the amplification cycles are completed and the amplicon is present at increased concentration.

[0505] In amplicons 2 and 4, the LightCycler® Red 640-labeled hybridization probe hybridizes to a part of the target sequence that is not polymorphic and functions as an anchor probe. In amplicons 1 and 3, the LightCycler® Red 640-labeled hybridization probe hybridizes to a part of the target sequence that spans the SNP site (SNP probe).

[0506] The Fluorescein-labeled hybridization probe hybridizes to a part of the target sequence in amplicons 2 and 4 that is polymorphic and functions as the SNP probe. In amplicons 1 and 3, it hybridizes to a part of the target sequence that is not polymorphic and functions as an anchor probe.

[0507] During the melting curve analysis of amplicons 1 and 3, increasing temperature causes the fluorescence to decrease because the LightCycler® Red 640-labeled hybridization probe, the shorter of the two probes (SNP probe) dissociates first and the two fluorescent dyes are no longer in close proximity. During the melting curve analysis of amplicons 2 and 4, in contrast, the increasing temperature causes the fluorescence to decrease because the Fluorescein-labeled hybridization probe, the shorter of the two probes (SNP probe) dissociates first and the two fluorescent dyes are no longer in close proximity.

[0508] For both amplicon 2 and 4, if the more frequent A-allele is present at the site of nsSNP #2 (A2383G [R776G]) or nsSNP #4 (A6769G [M2238V]), respectively, the mismatch of the SNP probe with the target sequence destabilizes the hybrid so the decrease in fluorescence will occur at a lower temperature. For amplicon 1, if the less frequent A-allele is present at the nsSNP #1 site (G1508A [R484H]), the mismatch of the SNP probe with the target sequence destabilizes the hybrid so the decrease in fluorescence will occur at a lower temperature. Likewise, for amplicon 3, if the less frequent G-allele4 is present at the nsSNP #3 site (C3780G [D1241E]), the mismatch of the SNP probe with the target sequence destabilizes the hybrid so the decrease in fluorescence will occur at a lower temperature. With the less frequent G-allele present at the site of either nsSNP #2 (amplicon 2) or nsSNP #4 (amplicon 4), or the more frequent G- or C-alleles at the site of either nsSNP #1 (amplicon1) or nsSNP #3 (amplicon 3), the genotype mismatches will not occur, and therefore the heteroduplex has a higher melting temperature (Tm). The heterozygous genotype at all four nsSNPs exhibits a distinctive combination of properties.

[0509] (2) Primers/Probes

[0510] Disclosed herein are four sets of oligonucleotide sequences (i.e., each set contains a PCR primer set and a FRET probe set) used as the reagents in the LightCycler/Hybridization Probe Analysis-based assay to rapidly genotype the four nsSNPs in the F8 gene of a given individual, and therefore to define their FVIII haplotype. These oligonucleotides (i.e., both primers and probes) are named according to the nucleotide position corresponding to the major transcriptional start of the F8 gene, found in SEQ ID NO:1, as well as the five other F8 gene sequences (i.e., SEQ ID NO:2; SEQ ID NO:3; SEQ ID NO:4; SEQ ID NO:5; SEQ ID NO:6), which corresponds to nucleotide position 1001. This site (i.e., nucleotide position 1001 in the F8 gene sequences) can also be correlated with the a single precise nucleotide position within the GenBank human F8 reference sequence (accession number is NG_{—}005114). The human F8 transcriptional start site sequence corresponds precisely with nucleotide position 465,469 in the complementary strand to that contained within NG_{—}005114.

(a) nsSNP # 1: (G61620A/G1508A/R484H)
H-F8-61568-F (forward):

(SEQ ID NO: 25)

5′-AATCAAGCAAGCAGACCAT
H-F8-61756-R (reverse):

(SEQ ID NO: 26)

5′-GGCCAACAGCTGGAGAA
H-F8-61629 (probe 1):

(SEQ ID NO: 27)

5′-LC^{Red640}-TACAAAGGACGGACATCAGTGATTCCG-phosphate
H-F8-61666 (probe 2):

(SEQ ID NO: 28)

5′-ATCGAGGGAATATTTACCTTTTGGTAATCTCCTTG-Fluorescein
(b) nsSNP # 2: (A91317G/A2383G/R776G)
H-F8-91221-F (forward):

(SEQ ID NO: 29)

5′-CAGAATTCAAGACACCCTAGC
H-F8-91381-R (reverse):

(SEQ ID NO: 30)

5′-CTCTGTCGCAAGAGCATC
H-F8-91298 (probe 1):

(SEQ ID NO: 31)

5′-LC^{Red640}-AGTCTTCTCTATGTCATTTTCTGGAATTGTGGTGG-
phosphate
H-F8-91320 (probe 2):

(SEQ ID NO: 32)

5′-TTCCGTGTGCAAACCAAGGG-Fluorescein
(c) nsSNP #3: (C92714G/C3780G/D1241E)
H-F8-92624-F (forward):

(SEQ ID NO: 33)

5′-GCCTCAGATACATACAGTGAC
H-F8-92774-R (reverse):

(SEQ ID NO: 34)

5′-TGTTCTATTTGTTGAATCATTTAATGACC
H-F8-92670 (probe 1):

(SEQ ID NO: 35)

5′-CTTTTCTTACTGAGCACTAGGCAAAATGTAGAAGG-Fluorescein
H-F8-92707 (probe 2):

(SEQ ID NO: 36)

5′-LC^{Red640}-CATATGACGGGGCATATGCTCCA-phosphate
(d) nsSNP #4: (A162161G/A6769G/M2238V)
H-F8-162073-F (forward):

(SEQ ID NO: 37)

5′-AATGGTGACCAAGAGGC
H-F8-162235-R (reverse):

(SEQ ID NO: 38)

5′-GATGAGGAACTCCTTCACATAC
H-F8-162136 (probe 1):

(SEQ ID NO: 39)

5′-LC^{Red640}-CCACTCTTTTGGATTATTCACCTGAGGGCAATAGA-
phospate
H-F8-162166 (probe 2):

(SEQ ID NO: 40)

5′-TTTCACTGTCTTCTGGAAGTCCACTTGC-Fluorescein

[0511] b) High-Resolution Amplicon Melting Curve Analysis

[0512] Disclosed are methods for determining a subject haplotype utilizing high-resolution amplicon melting curve analysis.

[0513] (1) Method

[0514] There are many methods available to genotype SNPs. Available methods that require a separation step include restriction fragment length polymorphism analysis, single-nucleotide extension, oligonucleotide ligation, and sequencing.

[0515] Homogeneous, closed-tube methods for SNP genotyping that do not require a separation step are attractive for their simplicity and containment of amplified products. Most of these methods are based on PCR. Melting curve analysis in conjunction with real-time PCR was introduced in 1997 (Ririe Anal. Biochem 1997 245:154), incorporated herein by reference. The ds DNA dye SYBR Green I was used for amplicon melting analysis and provided a rough characterization of what was amplified. Subsequently, hybridization probes were used to interrogate a limited region of the amplicon for sequence differences by melting curve analysis (Lay Clin Chem 1997 43:2262), incorporated herein by reference. The primary advantage of this method or other real-time PCR methods is that it can interrogate the entire region under the probe, rather than just detecting the presence or absence or a specific allele. Two hybridization probes are most commonly used for melting curve analysis of small sequence variations.

[0516] If PCR is done with a 5′-labeled primer, high resolution melting analysis can distinguish different homozygotes and heterozygotes (Gundry Clin Chem 2003 49:396), incorporated herein by reference. The disadvantages of this method are the requirements of a labeled primer and that the sequence variations must be within the melting domain that includes the labeled primer.

[0517] SYBR Green I has limitations for detection of small sequence variations. Detection of heterozygotes by melting curve analysis with SYBR Green I has been possible only when extra steps are added between amplification and analysis, such as amplicon purification and addition of high amounts of the dye (Lipsky Clin Chem 2001 47:635), incorporated herein by reference, or urea (Elenitoba-Johnson Am J Pathol 2001 159:845), incorporated herein by reference. Wittwer et al (Clin Chem 2003 49:6), incorporated herein by reference, screened several ds DNA dyes and found one, LCGreen I, that did detect heterozygotes, but did not inhibit or otherwise adversely affect PCR amplification. Unlike SYBR Green I, LC Green I saturates PCR products without inhibiting amplification and does not redistribute as the amplicon melts.

[0518] High resolution melting of PCR amplicons with LCGreen I was recently introduced as a homogeneous, closed-tube method for rapid SNP genotyping that does not require the use of probes. Genomic DNA is amplified in the presence of LCGreen I in LightCycler (Roche Applied Science) capillary tube. The capillary tube is then transferred to a high-resolution melting instrument (HR-1, Idaho Technology) for the melting curve acquisition and analysis. The instrument surrounds the capillary tube with an aluminum cylinder that is heated by a coil wound around the outside. Sample temperature and fluorescence signals are converted to 16-bit digital signals, providing resolution down to 0.002° C. and 0.002% normalized fluorescence. Approximately 50 data points are acquired for every 1° C. The melting curve acquisition requires only 1 to 2 min. Melting data are analyzed with the HR-1 instrument software. Fluorescence values are normalized between 0% and 100% by first defining linear baselines before and after the melting transition of each sample. Within each sample, the fluorescence of each acquisition is calculated as the percentage of fluorescence between the top and bottom baselines at each acquisition temperature. Heterozygotes are identified by a change in melting curve shape, and different homozygotes are distinguished by a change in melting temperature (Tm).

[0519] When coupled with rapid cycle PCR, SNP genotyping can be performed in 30 minutes or less. Although LightCycler real-time PCR instruments are commonly used in research and molecular diagnostic laboratories for melting curve analysis, the resolution of real-time PCR instruments is limited and they cannot distinguish the small Tm differences between homozygotes. Dedicated melting instruments have recently become available. Although only one sample at a time is analyzed the analysis time is so short (1 to 2 min) that the throughput is relatively high.

[0520] High-resolution melting of small PCR amplicons (<50 bp) is simple, rapid, and inexpensive method for SNP genotyping. Engineered plasmids representing all of the possible SNP base changes, and samples containing the medically important factor V (Leiden) 1691G>A, prothrombin 20210G>A, methylenetetrahydrofolate reductase 1298A>C, hemochromatosis 187C>G, and β-globin (hemoglobin S) 17A>T were successfully genotyped using this method (Liew Clin Chem 2004 50:7), incorporated herein by reference. In all cases, heterozygotes were easily identified because the heteroduplexes altered the shape of the melting curves. Approximately 84% of human SNPs involve a base exchange between A:T and G:C base pairs (Venter Science 2001 291:1304), and the homozygotes are easily genotyped by Tms that differ by 0.8 to 1.4° C. However in the remaining SNPs, the bases only switch strands and preserve the base pair, producing very small Tm differences between homozygotes (<0.4° C.). Although most of these cases can still be genotyped by Tm, about a quarter have nearest neighbor symmetry (complementary bases), and the homozygotes cannot be distinguished. In these cases adding a known homozygous genotype to unknown samples allows melting curve separation of all three genotypes. This method was used to identify C/C and G/G homozygotes in the hemachromatosis 187C>G SNP genotyping assay mentioned above (Liew Clin Chem 2004). This represents the worst case scenario, since the nearest neighbors of this SNP were complementary bases (A and T). When the bases flanking the SNP are symmetrical, the nearest neighbor stability calculations are nearly identical.

[0521] Disclosed herein is the use of high-resolution melting curve analysis in assays for the four F8 nsSNPs (G61620A, G92714C, A162161G & A91317G) whose naturally occurring allelic combinations (haplotypes) encode the 6 different wildtype forms of FVIII in humans.

Correlation of nsSNP genotypes with FVIII haplotype

| nsSNP no. | 1 (G61620A) | 2 (A91317G) | 3 (G92714C) | 4 (A162161G) |
|---|---|---|---|---|
| Haplotype 1 | G | A | C | A |
| Haplotype 2 | G | A | G | A |
| Haplotype 3 | G | A | G | G |
| Haplotype 4 | A | A | G | A |
| Haplotype 5 | G | A | C | G |
| Haplotype 6 | G | G | G | A |

[0522] DNA from whole blood samples can be extracted using a MagNA Pure instrument with a total nucleic acid kit. As Tm is strongly dependent on the ionic strength, it is important that samples are extracted in the same way and end up in the same buffer. Using this automated extraction system ensures uniformity in technique and nucleic acid yield.

[0523] To maximize the Tm differences between the genotypes, the amplicons can be made as short as possible (<50 bp). The sequence information surrounding the SNP will can be entered into computer software (“SNPWizard” at http:\\DNAWizards.path.utah.edu). The 3′ end of each primer can be placed immediately adjacent to the SNP and its length increased in its 5′ direction until its predicted Tm is as close to 55-60° C. as possible. The primer pair can then be checked for the potential to form primer dimers or other non-specific amplicons. If alternative products are likely, then the 3′end of one primer can be shifted one base away from the SNP and the process can be repeated until an acceptable pair is found. Candidate primer pairs can be synthesized using standard phosphoramidite chemistry.

[0524] Separate PCRs for each SNP can be performed in 10 μl volumes with the following reaction constituents: dNTPs (200 μM), KlenTaq1 polymerase (0.4 U), TaqStart antibody (88 ng), forward and reverse primers (250 nM each), LC Green I (lx), MgCl2 (3 mM), Tris buffer pH 8.3 (50 mM), and 1 μl DNA sample. Thermal cycling can be performed in a LightCycler real-time PCR instrument. Rapid thermal cycling can be performed between 85° C. and the annealing temperature at the programmed transition rate of 20° C./sec. Amplified samples can be heated to 94° C. in the LightCycler and rapidly cooled to 40° C. The LightCycler capillaries can then be transferred to the HR-1 instrument and heated at 0.3° C./sec. Samples can be analyzed between 65 and 85° C. with the instrument software. Fluorescence vs. temperature plots can be normalized as described above.

[0525] The ability of the high-resolution melting analysis to correctly identify the 4 informative SNPs and assign 6 Factor VIII haplotypes can be assessed with a set of samples authenticated by nucleic acid sequencing.

[0526] High-resolution melting can correctly identify SNP genotypes 1, 2, and 4 since they all represent transitions of G and A. High-resolution melting can correctly identify SNP genotype 3 as the G and C is simply inverted, that is, the bases switch strands but the base-pair remains the same. Differences in amplicon Tm still result from different nearest-neighbor interactions but they are usually small. However, SNP 3 is flanked by noncomplementary bases (A and G) and results in small but distinguishable change in Tm for the amplicon containing base inversion.

[0527] (2) Primers

[0528] Four oligonucleotide primer pairs (i.e., 8 total oligonucleotides) required to utilizing the method known as “High-Resolution Amplicon Melting-Curve Analysis” to genotype the 4 nsSNPs in the FVIII gene (F8) whose naturally-occurring allelic combinations encode the 6 distinct wildtype forms of the FVIII protein in humans.) The following four pairs of oligonucleotide sequences that represent the four primer pairs used in the PCR/High-Resolution Amplicon Melting-Curve-Analysis-based assay enable rapid genotyping of the 4 nsSNPs in the F8 gene of a given individual, and therefore to define their FVIII haplotype. These oligonucleotides are named according to the nucleotide position corresponding to the major transcriptional start of the F8 gene, which corresponds to nucleotide position 1001 of SEQ ID NO:1, as well as to nucleotide position 1001 in the five other F8 gene sequences (i.e., SEQ ID NO:2; SEQ ID NO:3; SEQ ID NO:4; SEQ ID NO:5; SEQ ID NO:6). This site (i.e., nucleotide position 1001 in the F8 gene sequences) can also be correlated with the a single precise nucleotide position within the GenBank human F8 reference sequence (accession number is NG_{—}005114). The human F8 transcriptional start site sequence corresponds precisely with nucleotide position 465,469 in the complementary strand to that contained within NG_{—}005114.

[0529] (a) nsSNP #1

[0530] G61620A (R484H): the minor allele of this nsSNP (i.e., which is an “A” at the nucleotide level and a “histidine” [H] at the amino acid level) is restricted to African-Americans.

A61620 (R484H)
H-F8-61599-F (forward primer):

(SEQ ID NO: 41)

5′-CTCACGGAATCACTGATGTC
H-F8-61643-R (reverse primer):

(SEQ ID NO: 42)

5′-GTAATCTCCTTGAATACAAAGG

nsSNP#1 forward genotyping primer Melting temperature (Tm): 40+20=60° C.
nsSNP#1 reverse genotyping primer Melting temperature (Tm): 40+20=60° C.

[0531] (b) nsSNP #2

[0532] A91317G (R776G): the minor allele of this nsSNP (i.e., which is a “G” at the nucleotide level and a “Glycine” [G] at the amino acid level) is restricted to Chinese individuals

G91317 (R776G)
H-F8-91298-F (forward primer):

(SEQ ID NO: 43)

5′-TGACCCTTGGTTTGCACAC
H-F8-91339-R (reverse primer):

(SEQ ID NO: 44)

5′-TGTATTTTAGGCATAGGTGTTC

nsSNP#2 forward genotyping primer Melting temperature (Tm): 40+18=58° C.
nsSNP#2 reverse genotyping primer Melting temperature (Tm): 32+28=60° C.

[0533] (c) nsSNP #3

[0534] G92714C (E1241D): the minor allele of this nsSNP (i.e., which is a “C” at the nucleotide level and a “aspartate” [D] at the amino acid level) is not restricted ethnically (Note that while C is the minor allele in the African-American population, in all other human populations, including Caucasians, it is the opposite with the “G” nucleotide and “Glutamate” [E] being the minor allele).

C92714 (E1241D)
H-F8-92691-F (forward primer):

(SEQ ID NO: 45)

5′-CAAAATGTAGAAGGTTCATATGA
H-F8-92738-R (reverse primer):

(SEQ ID NO: 46)

5′-TTGAAGTACTGGAGCATATGC

nsSNP#3 forward genotyping primer Melting temperature (Tm): 28+32=60° C.
nsSNP#3 reverse genotyping primer Melting temperature (Tm): 36+24=60° C.

[0535] (d) nsSNP #4

[0536] A162161G (M2238V): the minor allele of this nsSNP (i.e., which is a “G” at the nucleotide level and a “valine” [V] at the amino acid level) is restricted to African-Americans.

G162161 (M2238V)
H-F8-162141-F (forward primer):

(SEQ ID NO: 47)

5′-AAGTGGACTTCCAGAAGACA
H-F8-162182-R (reverse primer):

(SEQ ID NO: 48)

5′-TAGTTACTCCTGTGACTTTCA

nsSNP#4 forward genotyping primer Melting temperature (Tm): 36+22=58° C.
nsSNP#4 reverse genotyping primer Melting temperature (Tm): 32+26=58° C.

[0537] c) Functional Scan

[0538] (1) Method

[0539] See Example 2 for a discussion of an exemplary functional varation scan.

[0540] (2) Primers

[0541] Disclosed herein are 39 pairs of oligonucleotides used for scanning the functional regions of the human F8 gene in order to find naturally-occurring sequence variation that are candidates to have functionally distinct alleles that can influence thrombosis risk (for example, the D1241E nsSNP, because the D-allele is associated with a significantly higher mean FVIII levels than the E-allele) (See Example 2, below). However because it also changes an amino acid in a protein that is used as a therapeutic replacement molecule that is naturally immunogenic, they can also influence the immune response to treatment depending upon which allele a patient has and which allele they are treated with.

[0542] The SEQ ID's of the F8 gene sequences disclosed are used as the basis to name and thus define the exact position of the oligonucleotide sequences below, which as mentioned above, are the 39 primer pairs necessary for both amplifying and sequencing the F8 gene.

[0543] The nucleotide numbering scheme used for the F8 gene described in SEQ ID No's 1-6 (and therefore for the oligonucleotides) is based on the major transcriptional start of the F8 gene (i.e., the 5′-end of the predominant mRNA species for transcribed from the F8 gene), which corresponds to nucleotide position 1001 of SEQ ID NO:1, as well as to nucleotide position 1001 in the 5 other F8 gene sequences (i.e., SEQ ID NO:2; SEQ ID NO:3; SEQ ID NO:4; SEQ ID NO:5; SEQ ID NO:6). This site (i.e., the transcriptional start or nucleotide position 1001 in the F8 gene sequences) can also be correlated with the a single precise nucleotide position within the GenBank reference sequence for the human F8 gene whose accession number is NG_{—}005114. Since the sequence contained within NG_{—}005114 represents the antisense strand of the F8 gene, the transcriptional start site corresponds precisely with nucleotide position 465,469 in the complementary strand to that contained within NG_{—}005114.

| Primer Name: | Sequence: | Amplicon: |
|---|---|---|
| hF8-(−1214)-F | 5′-TTATCAAAGGGGCTTCTTGC-3′ (SEQ ID NO: 49) | A01 |
| hF8-(−573)-R | 5′-CATGCCCTTTCTCCTGACC-3′ (SEQ ID NO: 50) | A01 |
| hF8-(−683)-F | 5′-AGCAAGTGTTGAGGTCCAGG-3′ (SEQ ID NO: 51) | A02 |
| hF8-(−56)-R | 5′-TGAAGTAGCAAAAGGGAGGC-3′ (SEQ ID NO: 52) | A02 |
| hF8-(−168)-F | 5′-CTTCTCCATCCCTCTCCTCC-3′ (SEQ ID NO: 53) | A03 |
| hF8-441-R | 5′-CAGAAATGTTTCTTTGGGGC-3′ (SEQ ID NO: 54) | A03 |
| hF8-23012-F | 5′-CTTCAAATTTGCCTCCTTGC-3′ (SEQ ID NO: 55) | A04 |
| hF8-23436-R | 5′-AGACCAAGCAGAGGAAGACG-3′ (SEQ ID NO: 56) | A04 |
| hF8-25450-F | 5′-AATCTTGCCTCAGAGCAACC-3′ (SEQ ID NO: 57) | A05 |
| hF8-26066-R | 5′-GAAAAGCAATTCCTAGGGGG-3′ (SEQ ID NO: 58) | A05 |
| hF8-29413-F | 5′-GGGCAACAGAGTGAGACTCC-3′ (SEQ ID NO: 59) | A06 |
| hF8-30016-R | 5′-TTCTGGAACTCAGCTCCTCC-3′ (SEQ ID NO: 60) | A06 |
| hF8-35266-F | 5′-GGAGACCTGACATCAAAGCC-3′ (SEQ ID NO: 61) | A07 |
| hF8-35608-R | 5′-AACCCCATCTCCTTCATTCC-3′ (SEQ ID NO: 62) | A07 |
| hF8-37821-F | 5′-TAAGGTGTGAGCACACTGGG-3′ (SEQ ID NO: 63) | A08 |
| hF8-38404-R | 5′-CGATGAGTTCTGTTCTGAGCC-3′ (SEQ ID NO: 64) | A08 |
| hF8-52986-F | 5′-ATGGTGATTGGTGACCTTGG-3′ (SEQ ID NO: 65) | A09 |
| hF8-53544-R | 5′-GGAAACTAGGGGATCTTGGC-3′ (SEQ ID NO: 66) | A09 |
| hF8-55802-F | 5′-GTCTTGCTCCTGCTTTCACC-3′ (SEQ ID NO: 67) | A10 |
| hF8-56428-R | 5′-TACCCTTGCCATTTGATTCC-3′ (SEQ ID NO: 68) | A10 |
| hF8-56244-F | 5′-CTGCTGAAGAGGAGGACTGG-3′ (SEQ ID NO: 69) | A11 |
| hF8-56855-R | 5′-ATGTCCATTGGAGACAAGGC-3′ (SEQ ID NO: 70) | A11 |
| hF8-61345-F | 5′-GATTGTGGTATCTGCAGGGG-3′ (SEQ ID NO: 71) | A12 |
| hF8-61753-R | 5′-CAACAGCTGGAGAAAGGACC-3′ (SEQ ID NO: 72) | A12 |
| hF8-65333-F | 5′-TGACACTTTCACAGTCAACCG-3′ (SEQ ID NO: 73) | A13 |
| hF8-65920-R | 5′-CAGCAGGCACGTTTACTACG-3′ (SEQ ID NO: 74) | A13 |
| hF8-68456-F | 5′-CAGTCACCCTCTTGTCCTGG-3′ (SEQ ID NO: 75) | A14 |
| hF8-69067-R | 5′-GGGAATTAAAAGGGAGAGGG-3′ (SEQ ID NO: 76) | A14 |
| hF8-74699-F | 5′-CCTGGGAATAAGATAATGGGC-3′ (SEQ ID NO: 77) | A15 |
| hF8-75338-R | 5′-AAATGCTGGTGAGGATGTGG-3′ (SEQ ID NO: 78) | A15 |
| hF8-90867-F | 5′-ACAGCAGCAATGCAAAAACC-3′ (SEQ ID NO: 79) | A16 |
| hF8-91468-R | 5′-TCTATTGCTCCAGGTGATGG-3′ (SEQ ID NO: 80) | A16 |
| hF8-91365-F | 5′-ATGCTCTTGCGACAGAGTCC-3′ (SEQ ID NO: 81) | A17 |
| hF8-91942-R | 5′-AACAAAGCAGGTCCATGAGC-3′ (SEQ ID NO: 82) | A17 |
| hF8-91756-F | 5′-TTGGCAAAAAGTCATCTCCC-3′ (SEQ ID NO: 83) | A18 |
| hF8-92379-R | 5′-TAATTGCTTTGGACTGGGG-3′ (SEQ ID NO: 84) | A18 |
| hF8-92247-F | 5′-CCACCAGATGCACAAAATCC-3′ (SEQ ID NO: 85) | A19 |
| hF8-92850-R | 5′-TTTGCTTGGTTTGATTTCCC-3′ (SEQ ID NO: 86) | A19 |
| hF8-92700-F | 5′-GAAGGTTCATATGACGGGGC-3′ (SEQ ID NO: 87) | A20 |
| hF8-93290-R | 5′-ATGACTGCTTTCTTGGACCCC-3′ (SEQ ID NO: 88) | A20 |
| hF8-93200-F | 5′-TCTGACCAGGGTCCTATTCC-3′ (SEQ ID NO: 89) | A21 |
| hF8-93816-R | 5′-CATGATTGCTTTCACAAGCG-3′ (SEQ ID NO: 90) | A21 |
| hF8-93674-F | 5′-ATTGGATCCTCTTGCTTGGG-3′ (SEQ ID NO: 91) | A22 |
| hF8-94323-R | 5′-TGTCCCTGATTCCTCTACCC-3′ (SEQ ID NO: 92) | A22 |
| hF8-116050-F | 5′-ATGCAAAATGCTTCTCAGGC-3′ (SEQ ID NO: 93) | A23 |
| hF8-116647-R | 5′-AAAAGCTTGTTCAAAATAAATGG-3′ (SEQ ID NO: 94) | A23 |
| hF8-117559-F | 5′-TCTGTACCACTTCTTCCAGGG-3′ (SEQ ID NO: 95) | A24 |
| hF8-118125-R | 5′-TTTATGCCAGTCCAACCTGC-3′ (SEQ ID NO: 96) | A24 |
| hF8-118087-F | 5′-TATTTTTGGAAGGTGGGAGG-3′ (SEQ ID NO: 97) | A25 |
| hF8-118699-R | 5′-CGAATCCTTTGATCCTGAGC-3′ (SEQ ID NO: 98) | A25 |
| hF8-118318-F | 5′-TTGATGAGACCAAAAGCTGG-3′ (SEQ ID NO: 99) | A26 |
| hF8-118933-R | 5′-AGAGCATGGAGCTTGTCTGC-3′ (SEQ ID NO: 100) | A26 |
| hF8-120414-F | 5′-AAGCACTTTGCATTTGAGGG-3′ (SEQ ID NO: 101) | A27 |
| hF8-120947-R | 5′-TGGAGATCTTCGAGCTTTACC-3′ (SEQ ID NO: 102) | A27 |
| hF8-121066-F | 5′-GGACCCCAGTTTCTTCAGC-3′ (SEQ ID NO: 103) | A28 |
| hF8-121510-R | 5′-AGTGGGAAGTGGAGAGGAGG-3′ (SEQ ID NO: 104) | A28 |
| hF8-122636-F | 5′-GTATGCCATAAAGCCTTTATG-3′ (SEQ ID NO: 105) | A29 |
| hF8-123081-R | 5′-GTTCTAATCCCAGTAGAAGG-3′ (SEQ ID NO: 106) | A29 |
| hF8-126315-F | 5′-CCACAGCTTCACACACACAT-3′ (SEQ ID NO: 107) | A30 |
| hF8-126829-R | 5′-TCTATGAGCCTTGACACTAC-3′ (SEQ ID NO: 108) | A30 |
| hF8-159304-F | 5′-ttcccacttcttcttggtgc-3′ (SEQ ID NO: 109) | A32 |
| hF8-159934-R | 5′-tgggcatttaggttgactcc-3′ (SEQ ID NO: 110) | A32 |
| hF8-160633-F | 5′-tcatgccactacactccagc-3′ (SEQ ID NO: 111) | A33 |
| hF8-161150-R | 5′-ctgcccataaccaaacttcc-3′ (SEQ ID NO: 112) | A33 |
| hF8-161982-F | 5′-gggtgacagagcaagactcc-3′ (SEQ ID NO: 113) | A34 |
| hF8-162549-R | 5′-aaaaggcttgggaatcaagg-3′ (SEQ ID NO: 114) | A34 |
| hF8-184818-F | 5′-agatgtcccagatgcgtagg-3′ (SEQ ID NO: 115) | A35 |
| hF8-185411-R | 5′-GCTTTCATGCAGGTTTCTCC-3′ (SEQ ID NO: 116) | A35 |
| hF8-185329-F | 5′-TATTTTCTGCAGCTGCTCCC-3′ (SEQ ID NO: 117) | A36 |
| hF8-185941-R | 5′-CTTTCAACAATTGCATCCTCC-3′ (SEQ ID NO: 118) | A36 |
| hF8-185733-F | 5′-GAGGGGCACATTCTTATCTCC-3′ (SEQ ID NO: 119) | A37 |
| hF8-186382-R | 5′-TCATAGTGAAGGGGTCAGGC-3′ (SEQ ID NO: 120) | A37 |
| hF8-186289-F | 5′-CACCACACAATAGGATCCCC-3′ (SEQ ID NO: 121) | A38 |
| hF8-186832-R | 5′-GTCAATGGGAAAAGAATGCC-3′ (SEQ ID NO: 122) | A38 |
| hF8-186639-F | 5′-CAATCCACAAATGATGCAGG-3′ (SEQ ID NO: 123) | A39 |
| hF8-187259-R | 5′-AGTGCCAGGATTACAGGCAT-3′ (SEQ ID NO: 124) | A39 |

### F. EXAMPLES

[0544] The following examples are put forth so as to provide those of ordinary skill in the art with a complete disclosure and description of how the compounds, compositions, articles, devices and/or methods claimed herein are made and evaluated, and are intended to be purely exemplary and are not intended to limit the disclosure. Efforts have been made to ensure accuracy with respect to numbers (e.g., amounts, temperature, etc.), but some errors and deviations should be accounted for. Unless indicated otherwise, parts are parts by weight, temperature is in ° C. or is at ambient temperature, and pressure is at or near atmospheric.

### 1. Example 1

[0545] Recombinant factor VIII (r-fVlll) is the most widely-used and effective therapy for hemophilia A (hA). Many patients unfortunately become refractory when the wildtype (wt) protein is seen as foreign and is targeted by functionally neutralizing anti-fVIII antibodies termed inhibitors. While inhibitors occur most often in severe hemophiliacs with complex fVIII mutations and a complete circulating absence of the fVIII protein, recent studies show patients with missense-mutations (mMt) have a higher incidence than previously thought and demonstrate r-fVIII can be immunologically targeted even when differing by only a single amino acid. Because mMt represent the most frequent overall etiology of hA (˜39% of cases), common non-hemophilic protein variants of fVIII may represent an important novel modulator of inhibitor development in this setting. To determine the extent of such variation, all coding regions of the fVIII loci (F8) were resequenced in 137 healthy subjects from 7 ethnic groups, including 86 Caucasians and 16 African-Americans (AA). Five common nonsynonymous single nucleotide polymorphisms (nsSNPs) resulting in an amino acid change were identified. Whereas 4 were polymorphic in African-Americans (AA) only 2 were variable in Caucasians, despite having examined 6× the number AA X-chromosomes. Recent studies show AA patients have a 2-fold higher inhibitor incidence than Caucasians, thus establishing ethnicity as a risk factor in this complication. Minor alleles for 2 nsSNPs are restricted to AA and substitute amino acids in major B-cell inhibitor epitopes located in the A2 and C2 domains. To confirm these findings and accurately define the number and frequency of human haplotypes (H) (eg. distinct combinations in which the alleles of these 5 nsSNPs are linked in vivo) F8 was resequenced in a second study group that included 75 additional healthy AA. Here there are at least six distinct wt forms of the human fVIII protein by defining six haplotypes (H) from the four nsSNPs: H1, H2, H3, H4, H5, H6. H1 exists in all ethnic groups, is the most common overall form of fVlll and represents 2 of the 3 r-fVlll concentrates used clinically. While H2 is the most common form in AA (44%) and possibly represents the other therapeutic r-fVIll molecule, at least 20% will have AA-restricted fVIll proteins; H4 (4%) and H5 (12%) Only 2 forms of fVlll were found in Caucasians, H1 (90%) and H2 (10%), in contrast, and neither were ethnically restricted. In summary, when combined with reports of at least 2 other nsSNPs, it is established as inaccurate the long held view that fVlll is basically a monomorphic protein in non-hemophiliacs. Greater immmunologic barriers exist when r-fVlll is infused into patients with mMt in endogenous fVlll molecules containing one or more minor alleles of these nsSNPs. Moreover, due to the number and frequency of AA-restricted wt fVIII variants, these nsSNPs contribute pharmacogenetically to the higher incidence of inhibitors in this ethnic group.

### 2. Example 2

[0546] A high-normal to elevated plasma FVIII activity (FVIII:C) level is associated with increased risk for venous and arterial thrombosis. Despite being a highly heritable trait, the genes, other than the ABO blood group locus, responsible for the broad interindividual variance in FVIII:C remain to be identified. The structural FVIII locus (F8) is reported to have been excluded since earlier studies failed to detect linkage or associations between FVIII:C levels and polymorphisms in or near this candidate gene. However, because these studies were too small to detect quantitative trait loci (QTLs) with modest effects or low frequencies, used genotyping methods less sensitive than sequencing and/or examined only portions of the gene, every known functional region of F8 in 137 unrelated non-hemophilic individuals from different ethnic groups was resequenced. 20 of the 46 single nucleotide polymorphisms (SNPs) identified were previously unknown despite their location in one of the most intensely studied human genes. Because linkage disequilibrium (LD) across F8 was weak overall, the relationship between each SNP and FVIII:C was evaluated in 398 Caucasians from 21 Spanish families—The Genetic Analysis of Idiopathic Thrombophilia Project (GAIT)—using marginal measured genotype association analysis. C92714G, which encodes the conservative B-domain substitution D1241E, was associated with significantly lower FVIII:C levels (each G-allele contributes a 12.8 IU/dL reduction in activity) even after accounting for important covariates, including age and ABO genotype. Nevertheless, studies in other populations and/or in vitro are necessary to determine whether D1241E represents a functional QTL because the alleles of G56010A, a SNP in the 3′ splice-junction of intron 7, are in strong LD with C92714G.

[0547] The (immature) large glycoprotein coagulation factor (F)VIII is synthesized as a single polypeptide chain containing 2351 amino acids. The immature polypeptide sequence for each haplotype is disclosed as follows: H1 (SEQ ID NO: 13), H2 (SEQ ID NO: 14), H3 (SEQ ID NO: 15), H4 (SEQ ID NO: 16), H5 (SEQ ID NO: 17), and H6 (SEQ ID NO: 18). After removal of its 19 amino acid N-terminal signal-peptide in the endoplasmic reticulum, FVIII undergoes limited proteolysis intracellularly prior to secretion. The mature form of FVIII in plasma therefore contains 2332 amino acids and is a heterodimer comprised of a constant size light-chain and a non-covalently linked variable size heavy-chain. The mature polypeptide sequence for each haplotype is disclosed as follows: H1 (SEQ ID NO: 19), H2 (SEQ ID NO: 20), H3 (SEQ ID NO: 21), H4 (SEQ ID NO: 22), H5 (SEQ ID NO: 23), and H6 (SEQ ID NO: 24). Heterodimeric FVIII is an inactive procofactor that circulates in a non-covalent, tightly bound complex with von Willebrand factor (VWF). Thrombin, generated in low concentrations at sites of vascular injury by the extrinsic pathway during coagulation initiation, proteolytically converts FVIII into its active, but labile, heterotrimeric cofactor form (FVIIIa), which is released from VWF. Upon assembly, FVIIIa participates in the propagation phase of coagulation as a cofactor for the catalytically active serine protease FIX (FIXa) within a macromolecular enzyme complex known as intrinsic Xase after binding to membrane surfaces containing anionic phospholipids, whose sole function is to catalyze cleavage activation of its zymogen substrate FX. Hemophilia A, the X-linked bleeding disorder due to insufficient or absent FVIII coagulant activity (FVIII:C) in plasma, demonstrates that FVIII is indispensable for normal hemostasis. However a high-normal to elevated plasma FVIII activity (FVIII:C) level is associated with an increased risk for both venous and arterial thrombosis.

[0548] Several environmental and endogenous factors are associated with broad interindividual variability that exists for FVIII:C levels. Age, sex, oral contraception (OC), smoking, body mass index (BMI), diabetes mellitus (DM), ABO blood type, and plasma levels of total cholesterol (TC), low-density lipoprotein (LDL), triglyceride (TG), VWF, and FIX coagulant activity (FIX:C) all have substantial evidence supporting their role as determinants of FVIII:C. The relative ease of identifying, observing, measuring and/or characterizing these factors enabled investigators to discern their relationships with plasma FVIII:C level.

[0549] The 186-kilobase (kb) F8 gene, which is located on the long-arm (q) of the X chr within Xq28.1, and consists of 26 exons that comprise only five percent of the base pair (bp) total. Transcription may be robust to genetic variation in the promoter, particularly in the case of SNPs which do not cause length changes that could markedly destabilize the pre-initiation complex whose DNA-binding proteins overlap the transcription start site. The 1200-bp upstream DNA region from −1038 to +236, which contains most of the 5′-UTR, sufficiently promoted transcription in several liver-derived cell lines. Furthermore, 300-bp of the immediately contiguous 5′-genomic DNA exerted maximal promoter activity. This region contains several cis-elements that interact with DNA-binding proteins important for the transcriptional regulation of this gene; including a TATA-like sequence (GATAAA) located 30-bp upstream of the transcription start site. Additional cis-elements may also function as transcriptional regulators including a potential repressor located approximately 1-kilobase (kb) upstream of the gene. The presence of variants in this region of the promoter might contribute to “normal” variation of FVIII levels through variable transcription rates.

[0550] The F8 variation scan systematically covered the entire gene using a large number of chromosomes to identify variations in. A scan of F8 regions classically considered functional in 137 people for a total of 222 X-chromosomes was performed. All of the 398 subjects of the GAIT (Genetic Analysis of Idiopathic Thrombophilia) project were genotyped for the subset of variants polymorphic in the sample of Caucasians used.

[0551] F8 Reference Sequence

[0552] A 286-kb stretch of genomic DNA from Xq28.1 was obtained that contained the 186-kb F8 sequence plus 50-kb of both 5′- and 3′-genomic sequence from the UCSC Genome Browser on Oct. 12, 2004, which corresponds to NCBI Build 35 (hg17, the May 2004 release). This is the first version to contain all 26 exons; specifically, it included exons 21 and 22, which were missing from previous releases. For purposes of referencing the gene and variants, the reverse compliment of this sequence was used and assigned +1 to the transcription start site (+1 GCTTAGTGCTGAG+13) that and −1 to the base immediately 5′ to it. For instance, the promoter contains nucleotides with negative numbers and the putative TATA-box, GATAA, begins with G at base −30. “hg17” was used to indicate that the nucleotide numbering follows this convention.

[0553] Variation Scan

[0554] The variation covered all exonic sequences (coding and untranslated), 50- to 100-bp of intronic sequence from each splice junction, approximately 1-kb of the promoter, and about 300-bp of the immediately flanking 3′-genomic DNA. Table 1 lists the exonic regions, their lengths, hg17 nucleotide positions, and the encoded amino acids, if any. DNA fragments were amplified and sequenced that were 500- to 600-bp in length and, where necessary to cover an extended region, overlapped the primers by approximately 100-bp. Initially, 39 amplicons were generated, but lacked coverage of exons 21 and 22. Though absent from the variation scan, amplicons (designated amp29B and amp30B) were included for these two regions in the genotyping described below. Table 2 lists the amplicons and their hg17 nucleotide positions. Agencourt Biosciences performed the polymerase chain reaction (PCR) amplifications, cycle-sequencing reactions, and sequence determinations. The variation scan was performed using genomic DNA samples obtained from two discovery groups of human subjects. The first wave included genomic DNAs from 90 distinct individuals and one additional blind replicate. In addition, female GAIT founders were included (i.e., one unrelated female drawn from each of the GAIT families). The second wave consisted of 47 GAIT founders, 37 females and 10 males, with FVIII:C levels at the extremes of the founders. A total of 222 X-chromosomes were collected and the amplicons were sequenced in the forward and reverse directions in both of these waves.

TABLE 1
Characteristics of the 26 exons in F8.

| Exon | Length (bp) | Nucleotides* | Amino Acids⁺ |
|---|---|---|---|
| 01 (5′-UTR) | 171 | 1 . . . 171 | NA |
| 01 (CDS) | 143 | 172 . . . 314 | 1 . . . 29 |
| 02 | 122 | 23124 . . . 23245 | 29 . . . 70 |
| 03 | 123 | 25629 . . . 25751 | 70 . . . 111 |
| 04 | 213 | 29576 . . . 29788 | 111 . . . 182 |
| 05 | 69 | 35419 . . . 35487 | 182 . . . 205 |
| 06 | 117 | 37921 . . . 38037 | 205 . . . 244 |
| 07 | 222 | 53172 . . . 53393 | 244 . . . 318 |
| 08 | 262 | 56037 . . . 56298 | 318 . . . 405 |
| 09 | 172 | 56583 . . . 56754 | 405 . . . 462 |
| 10 | 94 | 61556 . . . 61649 | 463 . . . 494 |
| 11 | 215 | 65553 . . . 65767 | 494 . . . 565 |
| 12 | 151 | 68682 . . . 68832 | 566 . . . 616 |
| 13 | 210 | 74817 . . . 75026 | 616 . . . 686 |
| 14 | 3106 | 91048 . . . 94153 | 686 . . . 1721 |
| 15 | 154 | 116151 . . . 116304 | 1721 . . . 1772 |
| 16 | 213 | 117701 . . . 117913 | 1773 . . . 1843 |
| 17 | 229 | 118200 . . . 118428 | 1844 . . . 1920 |
| 18 | 183 | 118636 . . . 118818 | 1920 . . . 1981 |
| 19 | 117 | 120557 . . . 120673 | 1981 . . . 2020 |
| 20 | 72 | 121282 . . . 121353 | 2020 . . . 2044 |
| 21 | 86 | 122773 . . . 122858 | 2044 . . . 2072 |
| 22 | 156 | 126492 . . . 126647 | 2073 . . . 2124 |
| 23 | 145 | 159497 . . . 159641 | 2125 . . . 2173 |
| 24 | 149 | 160858 . . . 161006 | 2173 . . . 2222 |
| 25 | 177 | 162116 . . . 162292 | 2223 . . . 2281 |
| 26 (CDS) | 153 | 184972 . . . 185124 | 2282 . . . 2332 |
| 26 (3′-UTR) | 1806 | 185125 . . . 186930 | NA |

*Nucleotide numbering corresponds to the hgI7 reference sequence for F8.
⁺Amino acids whose codons are completely or partly contained in each exon; numbering based on the mature protein found in plasma (after removal of the 19 residue signal peptide), whose N-terminal alanine (amino acid # 1) corresponds to the 20^{th}-translated residue; NA—not applicable.

[0555] Genotyping

TABLE 2
F8 regions sequenced to identify and genotype common polymorphisms.

| Amplicon* | Forward Primer | Reverse Primer | Nucleotides⁺ |
|---|---|---|---|
| 01 | 5′-TTATCAAAGGGGCTTCTTGC | 5′-CATGCCCTTTCTCCTGACC | −1214 . . . −573 |
| 02 | 5′-AGCAAGTGTTGAGGTCCAGG | 5′-TGAAGTAGCAAAAGGGAGGC | −683 . . . −56 |
| 03 | 5′-CTTCTCCATCCCTCTCCTCC | 5′-CAGAAATGTTTCTTTGGGGC | −168 . . . 441 |
| 04 | 5′-CTTCAAATTTGCCTCCTTGC | 5′-AGACCAAGCAGAGGAAGACG | 23012 . . . 23436 |
| 05 | 5′-AATCTTGCCTCAGAGCAACC | 5′-GAAAAGCAATTCCTAGGGGG | 25450 . . . 26066 |
| 06 | 5′-GGGCAACAGAGTGAGACTCC | 5′-TTCTGGAACTCAGCTCCTCC | 29413 . . . 30016 |
| 07 | 5′-GGAGACCTGACATCAAAGCC | 5′-AACCCCATCTCCTTCATTCC | 35266 . . . 35608 |
| 08 | 5′-TAAGGTGTGAGCACACTGGG | 5′-CGATGAGTTCTGTTCTGAGCC | 37821 . . . 38404 |
| 09 | 5′-ATGGTGATTGGTGACCTTGG | 5′-GGAAACTAGGGGATCTTGGC | 52986 . . . 53544 |
| 10 | 5′-GTCTTGCTCCTGCTTTCACC | 5′-TACCCTTGCCATTTGATTCC | 55802 . . . 56428 |
| 11 | 5′-CTGCTGAAGAGGAGGACTGG | 5′-ATGTCCATTGGAGACAAGGC | 56244 . . . 56855 |
| 12 | 5′-GATTGTGGTATCTGCAGGGG | 5′-CAACAGCTGGAGAAAGGACC | 61345 . . . 61753 |
| 13 | 5′-TGACACTTTCACAGTCAACCG | 5′-CAGCAGGCACGTTTACTACG | 65333 . . . 65920 |
| 14 | 5′-CAGTCACCCTCTTGTCCTGG | 5′-GGGAATTAAAAGGGAGAGGG | 68456 . . . 69067 |
| 15 | 5′-CCTGGGAATAAGATAATGGGC | 5′-AAATGCTGGTGAGGATGTGG | 74699 . . . 75338 |
| 16 | 5′-ACAGCAGCAATGCAAAAACC | 5′-TCTATTGCTCCAGGTGATGG | 90867 . . . 91468 |
| 17 | 5′-ATGCTCTTGCGACAGAGTCC | 5′-AACAAAGCAGGTCCATGAGC | 91365 . . . 91942 |
| 18 | 5′-TTGGCAAAAAGTCATCTCCC | 5′-CTAATTGCTTTGGACTGGGG | 91756 . . . 92379 |
| 19 | 5′-CCACCAGATGCACAAAATCC | 5′-TTTGCTTGGTTTGATTTCCC | 92247 . . . 92850 |
| 20 | 5′-GAAGGTTCATATGAGGGGGC | 5′-ATGACTGCTTTCTTGGACCC | 92700 . . . 93290 |
| 21 | 5′-TCTGACCAGGGTCCTATTCC | 5′-CATGATTGCTTTCACAAGCG | 93200 . . . 93816 |
| 22 | 5′-ATTGGATCCTCTTGCTTGGG | 5′-TGTCCCTGATTCCTCTACCC | 93674 . . . 94323 |
| 23 | 5′-ATGCAAAATGCTTCTCAGGC | 5′-AAAAGCTTGTTCAAAATAAATGG | 116050 . . . 116647 |
| 24 | 5′-TCTGTACCACTTCTTCCAGGG | 5′-TTTATGCCAGTCCAACCTGC | 117559 . . . 118125 |
| 25 | 5′-TATTTTTGGAAGGTGGGAGG | 5′-CGAATCCTTTGATCCTGAGC | 118087 . . . 118699 |
| 26 | 5′-TTGATGAGACCAAAAGCTGG | 5′-AGAGCATGGAGCTTGTCTGC | 118318 . . . 118933 |
| 27 | 5′-AAGCACTTTGCATTTGAGGG | 5′-TGGAGATCTTCGAGCTTTACC | 120414 . . . 120947 |
| 28 | 5′-GGACCCCAGTTTCTTCAGC | 5′-AGTGGGAAGTGGAGAGGAGG | 121066 . . . 121510 |
| 29B | 5′-GAATTTAATCTCTGATTTCTCTAC | 5′-GAGTGAATGTGATACATTTCCC | 122740 . . . 122902 |
| 30B | 5′-TAAAAATAGGTTAAAATAAAGTG | 5′-TTTAAATGACTAATTACATACCA | 126453 . . . 126668 |
| 29A | 5′-TCAGGGTTGGTTACTGGAGC | 5′-ACACTACCATGGTCTTGGGG | 158245 . . . 158735 |
| 30A | 5′-AGTCAGTGGGCCTGTTATGG | 5′-GTCCCTAGCTCTTGTTCCCC | 158526 . . . 159105 |
| 31 | 5′-TGGGCAGATAGGGATAGTGG | 5′-TTTGTGCGTTTCTCAACAGC | 158833 . . . 159409 |
| 32 | 5′-TTCCCACTTCTTCTTGGTGC | 5′-TGGGCATTTAGGTTGACTCC | 159304 . . . 159934 |
| 33 | 5′-TCATGCCAGTACACTCCAGC | 5′-CTGCCCATAACCAAACTTCC | 160633 . . . 161150 |
| 34 | 5′-GGGTGACAGAGCAAGACTCC | 5′-AAAAGGCTTGGGAATCAAGG | 161982 . . . 162549 |
| 35 | 5′-AGATGTCCCAGATGCGTAGG | 5′-GCTTTCATGCAGGTTTCTCC | 184818 . . . 185411 |
| 36 | 5′-TATTTTCTGCAGCTGCTCCC | 5′-CTTTCAACAATTGCATCCTCC | 185329 . . . 185941 |
| 37 | 5′-GAGGGGCACATTCTTATCTCC | 5′-TCATAGTGAAGGGGTCAGGC | 185733 . . . 186382 |
| 38 | 5′-CACCACACAATAGGATCCCC | 5′-GTCAATGGGAAAAGAATGCC | 186289 . . . 186832 |
| 39 | 5′-CAATCCACAAATGATGCAGG | 5′-AGTGCCAGGATTACAGGCAT | 186639 . . . 187259 |

*To include all known functional F8 regions in the variation scan, 41 distinct segments (i.e., amplicons) of this structural locus were PCR amplified from genomic DNA samples and resequenced directly. To genotype the 12 F8 variations that were polymorphic in Caucasians (Table 3) in the entire GAIT cohort the 11 amplicons in bold were generated by the PCR and resequenced directly.
⁺Nucleotide numbers correspond to the hg17 reference sequence for F8.

[0556] Chromatograms were used to both detect and genotype variants at all stages. Agencourt used the PHRAP suite (www.phrap.org) to identify variants. PHRED output was used and a custom written SAS_{—}8.2 program was used to genotype individuals at the variant bases reported by Agencourt. In addition, the SAS program generated a separate chromatogram for each variant that placed the base of interest between two 10-bp flanks. By being compact and centering on the variant, these chromatograms standardized the manual review of the calls, when necessary. In the remaining GAIT individuals not in the variation scan, Agencourt sequenced the subset of amplicons in which at least one variable nucleotide was found among the Caucasians in the forward direction only. Finally, to verify the accuracy of the genotyping, as measured by the ability to confirm the original genotyping call, a subset of samples was replicated. When necessary to resolve any missing genotypes, amplicons were generated and sequenced. When it was necessary to perform manual reviews, forward and reverse sequences were paired from the same individuals, but the file names were not un-blinded, which revealed the well address and amplicon. INFER (PEDSYS, San Antonio, Tex.) was used to search for violations of Mendelian inheritance within the GAIT project, blanking any resulting discrepancies.

[0557] Statistical Analyses

[0558] The program Genecounting was used to estimate r² and D′, measures of allelic association. The program SOLAR was used to create plots of these statistics.

[0559] The measured genotype approach was employed to determine whether, among the members of the GAIT project, there were marginal genotype-specific differences in the mean FVIII:C level, adjusted for relevant environmental and endogenous factors. To account for the non-independence among family members, the analyses was performed using the program SOLAR, a likelihood-based variance component genetic analysis program. Any FVIII:C value was set beyond four standard deviations from the mean to missing.

[0560] Data was had for the following covariates: age, sex, smoking status, OC use, ABO blood group genotype, total cholesterol (TC), high density lipoprotein (HDL), low density lipoprotein (LDL), very low density lipoprotein (VLDL), triglycerides (TG), lipoprotein(a), BMI, diabetes mellitus (DM) status, VWF:Ag, and FIX:C. ABO genotypes were represented with indicator variables. For instance, AO had a value of one if the patient's genotype was AO, and it had a value of zero otherwise. A zero in each of the variables (AA, AB, AO, and BO) indicated the OO genotype, the reference level. Both smoking status and OC use were represented with dichotomous variables that indicated any versus no use, the reference level. Simple analyses were performed for each of the above variables to evaluate the association with FVIII:C levels. In these first analyses the covariate was the sole independent variable except in the case of ABO, which consisted of indicator variables, and age, which also had higher order terms. Further, bivariate analyses were performed with the endogenous factors and FVIII:C levels to investigate a shared genetic source. Those factors were excluded that shared common underlying genetic influences with FVIII:C from the final measured genotype analysis.

[0561] Because SNPs, including single-base-substitutions (SBSs) and insertion/deletions (INDELs), have a major (M) and minor (m) allele, there are five possible genotypes for each. Specifically, there are three genotypes in females who have two X-chromosomes (homozygous M-allele [X_{M}|X_{M}], heterozygous [X_{M}|Xₘ] and homozygous m-allele [Xₘ|Xₘ]), and two in males who receive their mother's X-chromosome and father's Y-chromosome (hemizygous M-allele [X_{M}|Y] and hemizygous m-allele [Xₘ|Y]. Thus, the genotype of each SNP was represented with a value of either 1 ([X_{M}|X_{M}] and [X_{M}|Y]), 0 ([X_{M}|Xₘ]), or −1 ([Xₘ|Xₘ] and [Xₘ|Y]), respectively, since no a priori knowledge was had of which allele might be associated with increased FVIII:C levels. Initial complex analyses were performed separately for each SNP in which age, age², sex, age×sex, age²×sex, AA, AB, AO, BO, smoking status and OC use were covariates to test for differences in the marginal genotype-specific mean FVIII:C levels. Subsequently analyses were performed using all of the available covariates previously mentioned for any SNP suggestively associated with FVIII:C levels at the p=0.10 level. The reason behind this tactic was to not enforce the same mechanistic effect on every SNP, but to allow for potential individual actions. In addition, age was represented by employing linear splines with knots at 15 and 50 years. A logarithmic transformation of FVIII:C levels was used to improve normality and a constant multiplier of 8.2 to avoid potential precision problems with numeric iteration in the statistical routines.

[0562] FVIII:C Levels

[0563] The mean±standard deviation (SD) for the FVIII:C levels in the GAIT study subjects was 150.7 IU/dL (±52.2 IU/dL), after excluding two women whose FVIII:C levels were more than 4 SD from the mean. FIG. 7 presents the FVIII:C levels versus age indicating the sex of each subject.

[0564] Variation Scan

[0565] 46 distinct SNPs were identified, which included 45 SBS and one INDEL, among the 19,157-bp covered in the variation scan. Table 3 lists these variants, their protein and genic details, and whether the UW-FHCRC scan or dbSNP also reported them. In this table, bold print indicates the variants genotyped in the GAIT subjects and the italics indicate nonsynonymous SNPs.

TABLE 3

| F8 Polymorphisms | | | | | | | | | | | | | |
|---|---|---|---|---|---|---|---|---|---|---|---|---|---|
| | | Amino | | | | | | | | | F8 Variation Databases^{a} | | |
| | Nucleotide | Acid | Minor Allele Frequencies* | | | | | | | | HAMD | | |
| Gene | (position/ | (position/ | | C | AA | Ch | SEA | J | MI | SAA | (HAM- | UW- | NCBI |
| (region) | allel | allel | Total⁺ | (n = | (n = 26) | (n = 13) | (n = 15) | (n = 8) | (n = 8) | (n = 8) | STeR | FHCRC | (dbSNP) |
| Promote | G-000825A | | 0.9% | NP | 7.7% | NP | NP | NP | NP | NP | NF | F8-002289 | NF |
| Promote | G-000824A | | 0.9% | NP | 7.7% | NP | NP | NP | NP | NP | NF | F8-002290 | NF |
| Promote | G-000493A | | 0.5% | NP | 3.8% | NP | NP | NP | NP | NP | NF | F8-002621 | rs4898404 |
| Promote | 4A: - | | 0.9% | NP | NP | NP | NP | NP | 25.0% | NP | NF | NF | NF |
| | [symbol] | | | | | | | | | | | | |
| Promote | T-000287C | | 0.5% | NP | 3.8% | NP | NP | NP | NP | NP | + | NF | NF |
| Intron 02 | G025610A | | 0.5% | NP | 4.5% | NP | NP | NP | NP | NP | + | F8-028722 | NF |
| Intron 03 | G025865A | | 0.5% | NP | 4.2% | NP | NP | NP | NP | NP | NF | F8-028977 | NF |
| Intron 03 | G025885C | | 0.5% | NP | 4.2% | NP | NP | NP | NP | NP | NF | F8-028997 | NF |
| Intron 03 | C029567T | | 0.5% | NP | NP | NP | NP | NP | NP | 12.5% | NF | NF | NF |
| Intron 04 | T029854C | | 0.5% | NP | 3.8% | NP | NP | NP | NP | NP | NF | NF | NF |
| Intron 05 | C035518G | | 0.9% | NP | 8.0% | NP | NP | NP | NP | NP | NF | NF | NF |
| Intron 06 | A053034G | | 0.5% | 0.7% | NP | NP | NP | NP | NP | NP | NF | NF | NF |
| [symbol] | | | | | | | | | | | | | |
| V. Ex | G053206T | VI. W0255C | 0.5% | NP | NP | NP | 6.7% | NP | NP | NP | +* | NF | NF |
| Intron 07 | C055938A | | 0.5% | NP | NP | NP | 6.7% | NP | NP | NP | NF | NF | NF |
| [symbol] | | | | | | | | | | | | | |
| Intron 07 | G056010A | | 9.6% | 6.4% | 26.9% | 7.7% | NP | 12.5% | 12.5% | 25.0% | + | F8-059122 | rs7058826 |
| [symbol] | | | | | | | | | | | | | |
| Exon 08 | G056113A | A0343A | 0.5% | NP | 3.8% | NP | NP | NP | NP | NP | + | F8-059225 | rs1800289 |
| [symbol] | | | | | | | | | | | | | |
| Intron 09 | T061534C | | 0.5% | NP | 3.8% | NP | NP | NP | NP | NP | NF | F8-064646 | rs5986899 |
| Exon 10 | G061620A | H0484R | 0.9% | NP | 8.3% | NP | NP | NP | NP | NP | + | NF | NF |
| Intron 13 | A090948G | | 0.5% | NP | NP | NP | NP | NP | NP | 12.5% | NF | NF | NF |
| Exon 14 | A091317G | R0776G | 0.5% | NP | NP | 7.7% | NP | NP | NP | NP | NF | NF | rs2228152 |
| Exon 14 | C092555T | H1188H | 0.5% | NP | 4.3% | NP | NP | NP | NP | NP | + | F8-095667 | NF |
| [symbol] | C092714G | D1241E | 14.7% | 7.7% | 72.7% | 7.7% | NP | 12.5% | 12.5% | 25.0% | + | F8-095826 | rs1800291 |
| | A092798C | S1269S | 7.7% | 6.3% | 3.8% | 7.7% | 20.0% | NP | 12.5% | 25.0% | + | F8-095910 | rs1800292 |
| Exon 14 | G092927A | K1312K | 0.5% | NP | NP | NP | 6.7% | NP | NP | NP | NF | NF | NF |
| Exon 14 | C093401G | V1470V | 0.5% | NP | 4.5% | NP | NP | NP | NP | NP | NF | NF | NF |
| Exon 14 | G093434A | P1481P | 0.9% | NP | 9.1% | NP | NP | NP | NP | NP | + | NF | NF |
| Intron 15 | C116434T | | 0.5% | NP | NP | 7.7% | NP | NP | NP | NP | NF | NF | NF |
| Intron 18 | T118909A | | 20.3% | 14.6% | 84.6% | 7.7% | 14.3% | NP | 42.9% | 37.5% | + | F8-122021 | rs4898352 |
| [symbol] | | | | | | | | | | | | | |
| Intron 19 | T120776C | | 24.5% | 17.3% | 75.0% | 7.7% | 16.7% | NP | 37.5% | 50.0% | + | F8-123888 | rs4074307 |
| [symbol] | | | | | | | | | | | | | |
| Intron 22 | C158352T | | 0.5% | 0.7% | NP | NP | NP | NP | NP | NP | NF | NF | NF |
| Intron 22 | T158368C | | 0.5% | 0.7% | NP | NP | NP | NP | NP | NP | NF | F8-161500 | NF |
| Intron 22 | C158635T | | 0.5% | NP | 3.8% | NP | NP | NP | NP | NP | + | F8-161767 | rs5987054 |
| Intron 22 | A158777G | | 0.5% | 0.7% | NP | NP | NP | NP | NP | NP | NF | NF | NF |
| Intron 22 | C158820T | | 0.5% | NP | 3.8% | NP | NP | NP | NP | NP | + | F8-161952 | rs5987053 |
| Intron 22 | G159087A | | 0.5% | 0.7% | NP | NP | NP | NP | NP | NP | NF | NF | NF |
| Intron 23 | | | 1.4% | 1.4% | 3.8% | NP | NP | NP | NP | NP | NF | F8-163006 | NF |
| [symbol] | | | | | | | | | | | | | |
| Intron 24 | G162013T | | 3.3% | 5.0% | NP | NP | NP | NP | NP | NP | + | F8-165145 | NF |
| [symbol] | | | | | | | | | | | | | |
| Exon 25 | A162161G | M2238V | 1.8% | NP | 15.4% | NP | NP | NP | NP | NP | NF | F8-165293 | rs1705196 |
| [symbol] | | | | | | | | | | | | | |
| Intron 25 | T162475C | | 4.1% | 5.6% | NP | NP | NP | NP | NP | 12.5% | + | F8-165607 | NF |
| [symbol] | | | | | | | | | | | | | |
| 3′-UTR^{†} | C185156T | | 0.5% | NP | 3.8% | NP | NP | NP | NP | NP | NF | F8-188288 | rs5986887 |
| 3′-UTR^{†} | G186341A | | 0.5% | NP | NP | NP | NP | 12.5% | NP | NP | NF | NF | NF |
| 3′-UTR^{†} | A186506G | | 0.5% | 0.7% | NP | NP | NP | NP | NP | NP | NF | NF | NF |
| 3′-UTR^{†} | | | 0.5% | 0.7% | NP | NP | NP | NP | NP | NP | NF | NF | NF |
| 3′-UTR^{†} | A186799G | | 24.8% | 17.4% | 76.9% | NP | 13.3% | NP | 50.0% | 50.0% | + | F8-189931 | rs1050705 |
| 3′-gDNA | T186987G | | 0.9% | NP | 9.1% | NP | NP | NP | NP | NP | NF | F8-190119 | NF |
| [symbol] | | | | | | | | | | | | | |
| 3′-gDNA | T187064C | | 1.8% | NP | 15.4% | NP | NP | NP | NP | NP | NF | F8-190196 | NF |
| [symbol] | | | | | | | | | | | | | |

*Frequencies estimated in 137 unrelated subjects from different ethnic groups: Caucasians (C), both Caucasian-American and Spanish-Caucasian; African-American (AA); Chinese (Ch); Japanese (J); Southeast Asian, excluding Ch and J (SEA); Mexican Indian (MI); and South American Andes (SAA). [symbol]
indicates data missing or illegible when filed

[0566] Genotype data were not complete for all subjects and variants, resulting in denominators that varied from the maximum number of X chromosomes for a group. Underlined SNPs were the ones genotyped in the entire GAIT cohort. ^{\} The bolded coding region SNPs emphasize the non-synonymous subset.

[0567] ^{a}Databases with F8 polymorphisms: HAMD—the HAMSTeRS Hemophilia-A Mutation Database (+ indicates a previously known polymorphism; * denotes missense mutation causing mild HA); VDR—the Variation Discovery Resource (denotes variants by gene and nucleotide position; located at University of Washington-Fred Hutchinson Cancer Research Center [UW-FHCRC]); dbSNP—database for Single Nucleotide Polymorphisms (denotes variant with a unique identifier; located at the NCBI). NF—not found.

[0568] Most of the variants had very low minor allele frequencies (MAF) and, it follows, were present in only one of the racial groups. For instance, 21 SNPs were present only in the group of subjects designated as African American. Of these, only two, A162161G and T187064C, had MAF above 10%. Only eight SNPs were present in more than one group, two of which were present in only two groups (Table 4). For these six alleles, the MAF had great range within the groups such that the description minor allele is a misnomer. For example, the minor allele at nucleotide C92714G in Caucasians was G (7.7%), but with an estimated frequency of 72.7% in African Americans, it is the major allele in this ethnic group.

TABLE 4

| Covariate | Beta Estimate | p-Value |
|---|---|---|
| Age (years) | −0.132 | 0.0167 |
| Sex | 0.253 | 0.0209 |
| Age × Sex | 9.377 × 10⁻⁰⁴ | 0.9914 |
| A_15* | 0.126 | 0.0289 |
| A_15 × Sex | 0.015 | 0.8693 |
| A_50* | 0.074 | <0.0001 |
| A_50 × Sex | −0.061 | 0.0066 |
| Oral Contraceptive Use (Yes/No) | −0.632 | 0.0271 |
| Smoking Status (Yes/No) | −0.288 | 0.0121 |
| AA | 0.882 | <0.0001 |
| AO | 0.648 | <0.0001 |
| AB | 0.727 | 0.0553 |
| BO | 0.668 | 0.0019 |
| BMI (kg/m²) | 0.132 | 0.3439 |
| Triglyceride (mM) | 0.362 | 0.0084 |
| D1241E (+1, 0, −1) | 0.312 | 0.0244 |

*Coefficient for the splines with knots at 15 and 50 years.

[0569] Allelic-Association

[0570] FIG. 8 presents the estimated r² and D between each pair of alleles, respectively. (FIG. 8A) The hg17 sequence used as a reference for F8 in this study spans about 287-kb and contains the approximately 187-kb structural locus and 50-kb of both the 5′ and 3′ flanking genomic DNA. The F8 locus consists of 26 exons (triangles) and 25 introns (intervening black lines). The 1.2-kb and 0.3-kb promoter and flanking 3′-genomic segments scanned for variations are indicated. The numerous repetitive elements (RepeatMasker) in this gene are indicated by different colored triangles. (FIG. 8B) The 41 amplicons used for variation detection and genotyping are indicated by open boxes. (FIG. 8C) The 46 SNPs identified in the variation scan, and two additional SNPs (G75215A and T186594C) discovered by genotyping the extended GAIT cohort for the polymorphism subset variable in at least Caucasians, are designated by their gene location (left) and nucleotide position in the transcription unit. Promoter SNPs are located upstream of −1. Major- and minor-alleles are shown on the left and right. The 17 exonic- and 11 coding-region-SNPs are also indicated by their nucleotide and amino acid positions in the polyadenylated mRNA and mature form of the circulating FVIII protein, respectively. Finally, the five coding region SNPs resulting in nonsynonymous amino acid substitutions are shown in green; G53206T is actually a missense mutation identified in a non-affected female carrier since Trp255Cys represents a known cause of mild hemophilia A in Chinese individuals.

[0571] Measured-Genotype Analysis

[0572] Age, smoking status, OC use, DM status, BMI and the plasma levels of TC, LDL, VLDL, TG, VWF and FIX:C were associated with FVIII:C levels at the p=0.10 level. In addition, sex and its interactions with age were included, despite non-significant results in the univariate analysis. Bivariate analyses of FVIII:C levels with both FIX:C and VWF levels suggested that they shared common underlying genetic influences and thus were excluded from the multiple covariate measured-genotype analysis.

[0573] Only the analyses for G56010A, an intron 7 SNP located 27 nucleotides upstream of its 3′-splice junction (i.e., position −27), and the non-synonymous coding region SNP C92714G, which encodes the known aspartate to glutamate substitution in the B-domain residue 1241, suggested significant differences in the genotype-specific mean FVIII:C levels. Therefore, these SNPs were further explored separately in a more complex model. Table 4 presents the results of the final model in the analysis of D1241E and FVIII:C levels. Among the GAIT founders who had no parental data, the D′ between these two SNPs was 0.84. Since the results were similar, more complete genotyping data was had for D1241E (one DD female, 2 DE females, and 3 EY males had missing genotypes for G56010A), and D1241E results in an amino acid change, the results for this SNP were presented.

[0574] When LDL and DM status were included in the full model, the beta-estimate for the effect of D1241E was 0.295 (p=0.0356). Excluding these variables did not meaningfully affect the point estimate or improve the precision (Table 4), suggesting that these factors were not confounding the relationship between this SNP and FVIII:C levels. When VLDL was substituted for TG levels in the above model, the resulting estimate of the effect of D1241E was 0.300 (p=0.0294). As expected, Pearson's correlation coefficient between TG levels and VLDL was high, p=0.96 (p<0.0001), which did not account for non-independence between these observations. The estimate of the correlation coefficient was similar when the analysis was restricted to (independent) founders.

[0575] In the completed a variation scan of the known functional regions of the F8 using 222 X-chr from unrelated, non-hemophilic patients two variants were found whose alleles were highly associated with each other, G56010A and C92714G (corresponding to amino acid D1241E), and also significantly associated with FVIII:C levels. Interestingly, there was not strong association between the alleles (see FIG. 9) of F8 variants overall. As far as C92714G is concerned, only four polymorphisms had alleles with a D of approximately 0.50: G56010A, A118909T, C120776T, and A186799G. Among the GAIT members that had no parental data (i.e., founders), the D′ between these alleles and C92714G were 0.84, 0.46, 0.47, and 0.54, respectively.

[0576] FIG. 9 illustrates the pattern and degree of LD across F8 in various human populations. The subset of 47 F8 polymorphisms variable in the 148 unrelated Caucasian subjects studied were evaluated pairwise for LD. Both commonly used parameters of LD (i.e., D′ and r²) were determined using maximum likelihood haplotype frequencies estimated by the expectation-maximization (EM) method implemented in GENECOUNTING. Individual polymorphisms are listed along the y-axis in their 5′ to 3′ gene orientation and along the x-axis according to their nucleotide position within the F8 genomic sequence. The estimates of LD based on D′ are shown above the pair-wise line of identity, which passes through the origin, while those based on r² are shown below. The color legend on right illustrates semi-quantitatively the possible degrees of LD that can exist between the alleles of any polymorphism pair; white (LD=0) indicates linkage equilibrium while red (LD=1) indicates complete LD or allelic association.

[0577] The distribution of FVIII:C levels, even within members of the 21 Spanish families of the GAIT project, displayed the typical variability of this trait and had an estimated heritability 0.40. Several factors were controlled for in the final analysis. The support for the association between age and FVIII:C levels is among the strongest. The graph of crude FVIII:C levels versus age appears and the results of the analysis also supports this relationship (see FIG. 7 and Table 4, respectively). The use of splines with age allowed for a less rigorous imposition on the data, namely that the same fit not be enforced across the entire range of approximately 2 to 87 years. For example, flexibility was allowed in the effects of age on FVIII:C levels in the young and the old, instead of modeling, for instance, a quadrant effect across both periods in which the age data for the old influences the estimated response for the young, and vice versa.

[0578] The results of the analysis support the finding that smokers had lower mean FVIII:C levels than non-smokers. As detailed information on smoking was lacking, this relationship was not further elucidated in the analyses.

[0579] OC use had an apparently large effect, to that for ABO blood group (see Table 4).

[0580] There is also strong support for an association between FVIII:C levels and ABO blood group and between FVIII:C levels and VWF. In separate bivariate analyses with FVIII:C levels, it was found that each of VWF and FIX had potential overlap in the set of (unknown) genes that may affect their trait levels. Since variance components-based analyses were performed as implemented in the program SOLAR, in which the covariance between family members is used to estimate the additive genetic variance, including such variables in the analyses was not germane to this example. Further, the inclusion ABO blood type, which has a potential pleiotropic effect on VWF and FVIII:C levels, also supports the exclusion of VWF.

[0581] Removal of TC/LDL from the model had negligible impact upon the point estimate of the effect of the SNP and its precision. Removal of TG/VLDL had a noticeable impact and VLDL was included. The choice between TG and VLDL was arbitrary and the results were very similar.

We claim:

1. A Factor VIII replacement preparation comprising an effective amount of purified Factor VIII (FVIII) having a haplotype selected from the group consisting of the H3 haplotype, H4 haplotype, H5 haplotype, and H6 haplotype,
wherein each haplotype of the purified FVIII is enriched from plasma of a plurality of donors each having only the corresponding haplotypically-pure haplotype of FVIII, or
wherein the purified FVIII is a recombinant FVIII that is produced from cDNA that comprises SEQ ID NO: 3 for H3 haplotype, SEQ ID NO: 4 for H4 haplotype, SEQ ID NO: 5 for H5 haplotype, or SEQ ID NO: 6 for H6 haplotype.

2. The FVIII replacement preparation of claim 1, wherein the purified FVIII comprises a polypeptide having the amino acid sequence of SEQ ID NO: 22, having the H4 haplotype.

3. The FVIII replacement preparation of claim 1, wherein the purified FVIII comprises a polypeptide having the amino acid sequence of SEQ ID NO: 23 having the H5 haplotype.

4. The FVIII replacement preparation of claim 1, wherein the purified FVIII comprises a polypeptide having the amino acid sequence of SEQ ID NO: 24, having the H6 haplotype.

5. The FVIII replacement preparation of claim 1, wherein the purified FVIII comprises a polypeptide having the amino acid sequence of SEQ ID NO: 21, having the H3 haplotype.

6. The FVIII replacement preparation of claim 1, wherein the donors are African American or of African descent.

7. The FVIII replacement preparation of claim 6, wherein the African American donors or donors of African descent are male and hemizygous for the gene encoding a specific haplotype Factor VIII or female and homozygous for the gene encoding a specific haplotype Factor VIII, wherein the specific haplotype Factor VIII is selected from H3, H4, and H5.

8. The FVIII replacement preparation of claim 1, wherein the donors are Chinese American or of Chinese descent.

9. The FVIII replacement preparation of claim 8, wherein Chinese American donors or donors of Chinese descent are male and hemizygous for the gene encoding haplotype 6 Factor VIII or female and homozygous for the gene encoding haplotype 6 Factor VIII.

10. A method for treating a subject with hemophilia having a defective FVIII comprising administering to the subject with hemophilia a Factor VIII (FVIII) replacement preparation comprising an effective amount of a purified FVIII having a haplotype selected from the group consisting of the H3 haplotype, H4 haplotype, H5 haplotype, and H6 haplotype,
wherein the FVIII haplotype of the subject and the administered purified FVIII are the same regardless of the type of FVIII mutation the subject has.

11. The method of claim 10, wherein the purified FVIII has the H3 haplotype protein comprising a polypeptide having the amino acid sequence of SEQ ID NO: 21 and the subject has H3 haplotype regardless of the type of FVIII mutation the subject has.

12. The method of claim 10, wherein the purified FVIII has the H4 haplotype protein comprising a polypeptide having the amino acid sequence of SEQ ID NO: 22 and the subject has H4 haplotype regardless of the type of FVIII mutation the subject has.

13. The method of claim 10, wherein the purified FVIII has the H5 haplotype protein comprising a polypeptide having the amino acid sequence of SEQ ID NO: 23 and the subject has H5 haplotype regardless of the type of FVIII mutation the subject has.

14. The method of claim 10, wherein the purified FVIII has the H6 haplotype protein comprising a polypeptide having the amino acid sequence of SEQ ID NO: 24 and the subject has H6 haplotype regardless of the type of FVIII mutation the subject has.

15. The method of claim 10, wherein each haplotype of the purified FVIII is enriched from plasma of a plurality of donors each having only the corresponding haplotypically-pure haplotype of FVIII, or wherein the purified FVIII is a recombinant FVIII that is produced from cDNA that comprises SEQ ID NO: 3 for H3 haplotype, SEQ ID NO: 4 for H4 haplotype, SEQ ID NO: 5 for H5 haplotype, or SEQ ID NO: 6 for H6 haplotype.

16. The method of claim 10, further comprising determining the haplotype of the subject regardless of the type of FVIII mutation the subject has.

17. The method of claim 10, wherein the defective FVIII of the subject has deletions, inversions, and/or nonsense mutations.

18. The method of claim 10, wherein the defective FVIII of the subject has an intron-22 inversion.

19. The method of claim 10, wherein the subject is African American or of African descent having a defective H3, H4, or H5 haplotype FVIII.

20. The method of claim 10, wherein the subject is Chinese American or of Chinese descent having a defective H6 haplotype FVIII.

The application's sequence listing, which the Patent Office published only in electronic form, follows.

SEQUENCE LISTING (134 sequences)

SEQ ID NO: 1 - DNA, 188930 bp, Artificial Sequence
  synthetic construct
tcaccatggctacattctgatgtaaagagatatatcctatacctgggccaaatgtaaacagcctggaaaagtgttaggttaaaaacaaaacaaaataaataaatgaataaatgccaggtggttatgagtgctattgagaaaaatgaagccaagagggatatcagtgatgcaggtgggggtaaagagcttacaacataaatgtggtgttccatatttaaacctcattcaacagggaagattggagctgaaatgtgaaggagttgtgggagtggaactacgtggaaatctgggggaaaggtgttttgggtaaaagaaatagcaagtgttgaggtccaggggcatgagtgtgcttgatattttagggaagagtaaggagaccagtataaccagagtgagatgagactacagaggtcaggagaaagggcatgcagaccatgtgggatgctctaggacctaggccatggtaaagatgtagggttttaccctgatggaggtcagaagccattggaggattctgagaagaggagtgacaggactcgctttatagttttaaattataactataaattatagtttttaaaacaatagttgcctaacctcatgttatatgtaaaactacagttttaaaaactataaattcctcatactggcagcagtgtgaggggcaagggcaaaagcagagagactaacaggttgctggttactcttgctagtgcaagtgaattctagaatcttcgacaacatccagaacttctcttgctgctgccactcaggaagagggttggagtaggctaggaataggagcacaaattaaagctcctgttcactttgacttctccatccctctcctcctttccttaaaggttctgattaaagcagacttatgcccctactgctctcagaagtgaatgggttaagtttagcagcctcccttttgctacttcagttcttcctgtggctgcttcccactgataaaaaggaagcaatcctatcggttactgcttagtgctgagcacatccagtgggtaaagttccttaaaatgctctgcaaagaaattgggacttttcattaaatcagaaattttacttttttcccctcctgggagctaaagatattttagagaagaattaaccttttgcttctccagttgaacatttgtagcaataagtcatgcaaatagagctctccacctgcttctttctgtgccttttgcgattctgctttagtgccaccagaagatactacctgggtgcagtggaactgtcatgggactatatgcaaagtgatctcggtgagctgcctgtggacgcaaggtaaaggcatgtcctgtagggtctgatcggggccaggattgtggggatgtaagtctgcttggaggaaggtgcagacatcgggttaggatggttgtgatgctacctgggccccaaagaaacatttctgggtaaggtgtgcacacatctgtgttattagcagaaatgctaactgccaattcttttcataggtctgacctatttgttgatattttgttctgttttgtccattgcttctcttcgtcatatgctgctcctccagaatctagagactggagtagagggagggtgaagggacaaagacaaaacttccctctgcctgcccaagcttccatagagagaatcaaggcaatgaaatccaatcaatatcacacacaagtttcatgtctggttctcttgtgtgtacatgcaatgtgtgtttttataatatcttttcctactttgggtgtaaggataatatgagccttgagttcagaagcttttcgtgttttgggggttctggtgcatttaggcagagtattaaataactttatcaatattgtctatggtcatcagttgattcagatttttctacctcttcttcagtaaatattggtatattttggtctatactttcatagaaagcaatctactgtccctagatttgataatgtattggtatcaagttatgtaagagtctcctgtgattttgttaaactgttctgtgtctgtagttatattttctttttcattccttatgttgtatatgttctcttcctctcttttaaaaataatatttccaggagttttcttgattttattggtcttgtcaagaattttcttttggtttgatttatcaatctcttttttctttctgttgcatcagtttctgcttctactttcattgatttattccttccttctaatttcctttggttcattttgttgttagatttttgcttcttgagttgaatgctgaaatcatttattttatttttttgtcttctttaaatgtgtattataaagatttaaatataatacatagattgtggctgtgtaaacattaaatgtggtcatgttgtacatactttatattctttttggttctttctgtttggctccccaccctctttccacatcagtccccttctcccccacctcagctaggtaaccccagtatgataatatatattcacatacacatacacacacacaaaggttttcttggacattatttgttttataaaattgggacattatacacacatttctcactcattaacacgtactagaactctaagtcaattggtatagctttaattcattatttttattggctatataagattctatggtatggctgtatcacaatttagtcaatatgttcactttattccagtttttggctactatatcctatatcattacatactggtgcttttacttctgttgaacaaacttgcaagaggaatattaatggaacgaagggaatgtttccttctaagttttaatttccaaagaggtcagaacttttcaaacatttctaccatcgaagtatgaaaatggccttctctctgcattcacatagcgataagttttatcctgtttttaaaatttgccaattttacaggtgtagagtgatattgcatcattactttcattgtgttatttttatttctaataagttgagcatctttttaaatgcttgttggctattggatttatttgggggatttaattagtcatatgatttgcccattattctttggactctttcatttaaaaaaattatgagaacccttttattattacaaatattaactctttgtcatgtatattgcagttttccccaagatctattgtttgtctgttgactttcttataacttttaccaaaacagtttttaatttttataatcagagatatcttttctttcatatcttcagagtcggcaaggttggttaaaaatgtttcccacacctcaagattgtacgtgtaatctcccagattttcttgcaagatgtttactgtttcgctttttatatgcattgcttcaattatctgctaattacttttgtcatatggcatgagagagggatttgtctagttttatttccatccagatcaatagcctattgtgatggcaccttttgccactgatttgaatcaacacattcatcatataaagttctcatatatattagcatatatttctggattcattaggctgtttcactaatctactattatcttgctatgccagtaccatagtgatttgattacagtgagcctatgatatcttctgatatctggtgggtgaaagcaatcctcactattctttttgtacctttcttagctattcttagacactttattcttccacataaaactgttaagatatttttcaaattaaaaagatccaagccctgttgtgattctaactgcaatttcattaaactcagaccttaattttattaatgtaataaatttaaatatttttcttattacatttatctctgtgtattttataagtgtgatgctattgttaataagatagttttctcctatttccatttatgagtgcttagtaccaaatagagataagctattggtttgtgtattttcagctttttcttttgagcctgggtctcattttgtcacccaggctggagtgcagtggggtgatctcaccttactgcagcctcaacctcctggattcaagcaattctcctgtatatcagccccccaagtagctgggactacaggagcaggccaccatgcccggaaaatttttgtatattttttagagatgggtttttgccatgttacccaggctggttttcaactcctgagctcaagcattccccccacctcagcctcccaaagagctaggattacaggtttgagccaccgcacccagccattgtatattcatcttaaatctagctaccttaccaaatttgcctattaattctagtaattttaccctaaagtctctgtgagtattgaatcatatcataagttaaatgagacagattttagctcatttccaatatttatagccagttatttcattttcttatcttattgaatttattagaaaacaagagcaaatgttaaataataacaatgaaagtgaacattccttctactctatgattttacttgaaataatttttgtattttgctatttagagtaacatttgctgttttggtttttgtaaatggtgtttattctattctcatttgccacaaaatgtttatcataaataagttttcagcagctggtatcatctgaattgtcttctttgatatgctgatgaacaaattatgttcatagatgtcctgacactaaatacccttacattcttggagtaaaatctactattcatggaatttgatcattagtgggttctatgtactatttctttagactattcttagtagattttcactactcaacctactaataataataaacaaagttttgttggctttatcaaatgaattgatgagtactccatctttttctattgcttagaatagcttaagtaacatttgaattatccattgtctaaaagttaggtgagactcacttatgaatccatttggtcctagtggcatttgcaatatctttaatcacccctccaggctcttctatgataatcagtcaattcaagtttcaacttccaataattatatacctttctaggaagtaactttatttattttttcaattttgttgccacagtgttgcatgtagcactcactcatgattcttttactccacattatctgtagttatgtgccctttcttattcctaaattcctctatctttgctatttatctttttttccttgaataagcttgccaatgacttgtctattttgttgctggtggtgctcttttcaaagaatgggcttttggattttttttttttctagttggtataaagcatttttattttcactgagcagaaaaagaagctattgattcattaactgtgctgctttattggcatgtagctatgcactgttcacacattaatatataaaactcgtcagtctgttttattttgtctgatgggaaaacatgaacagtgagatttcttatgcaaaaagtgaacagttcaactatgctagctccatatacctttattaacattccagagacttatcctctcaacatgatctgatttctgtaggataacttttcaggaaaagtattttctgatcagtgaagcttggagatataaataagcaatcggccaggtatggtggttcatgcctgtaatcccagcactttgggaggccgaggcaggcagatcacctgaggtcaggagtttgacaccagcctagccaacatggcaaaactccgtgtctaccaaaaaaaaaaaaaaaattagctgggcatggtggtgctcacctgtaatcccagctactgaggaggctgaggcaggagaattgcttgaacctaggaggcggaggtggcagtgagctaagattgtgctcagcctaggtgacagagtgagactccatttcaaaaaataaaaaaataaaaaaaagcagtatctctcatattcattaactggaccctgactttcttaaagctcaccccaaagctgaagtccatgaaggcactagttctcaaacttcagtgtgcataagaatcactcgggaagcttattaaaatttacattcctaggccccatcctcagcaaactatttagtccccaggtaattctatcccaccccaccccagctttattgtggtataattgacaaataaaagttgtatatatttaaggtgtacaagataatgttttgatgtaagtatacattgtaaaatggtatagcatgaagggttttcttttcatttttttcagaatagtttgtaatatcttctttgatttcatctttgataatctagacgtatgattttaattgctttttaaatttgtttatcaagttagtttgtagtatttgggtcaacattgaatatcctgttaatttcctattgctgtgtaacaaactacatcaaatgtatcagcttatgacagacccatttactgtctcacagtttctgtgagttagaagtccaggtggactcagctggatactctgtgcagggtcatacaaggccaacaccaaggttttaatagggctgcactccttagtgaaagctcttggggagaatctgcttacaggctcatttggaatgttagcaaattcagttccttctctcactttccatgtagtgccctctaccagcaatggtgcatcaacactctctcatgcttggaattgctctgacttcaattttccgtgcatatctctggccttttttgcctctctcttttacttttaaggactcatgtgattacattgggccgacctgggtaattcagaatactctccccatctcaaggtcagctaatcagccccttaattccatctgcaaagtttaatttgccacataatatatttttggacatgacaccaaggagcaaaggtgatgtgggccaaatttttacctgccacaggtatagtttacatacaatgaagctcatcaattttaaatatgcagtttgatgagttttgacaaatgcatacacttgcataaccaccaccctaatcaacatgcatttacatcaaccctcctgcaactttttaatgagtctctcccactgacctggcctcagccaataaactgctatctggaagttacagatttgttttcacatgttctagaattttacatcagtggaatcatacggtatgtattcttctatggctttttttcttcagcatcatgatttggaaattcatgcaggttgttgtataaagtatttctatcctttttattgctgattactgctccattatgggattatatcataattttggattatttccagttaggagcaaatacaaataaacctgctatgaacagtgctccacatgttttgtgtgaacatctattttcatttatcttagttaaatatctaggagtggaattgctggatcatatggtaagtgcatgtttaagagaaactgccagacagatttcttgaacgtaccattctatactcccaccagcaatgcatgagagttccagttgcaatatatcctggacaacatttgatgttgccagtacttaatgactgcacagtggtatctcactatacttttttttttttttgagatggaatctcatcccatcacacaggctggagtgcagtggcgcaatctcagctcaacatctgcctcctaggctcaagcaattctcatgcctcagcctcctgagtagctaggactatggtcacacgccaccgtgcccagctaatttttgtatttttggtagagacggggttttgccatgttggccaggctggtctcaaactcctggcctcaagtgatccacccgcctcggcctcccaaaatgttgggattacggcttgagccactgcacctggttatacttttaatttgcgtgtctctgatgactaaagatgttgagcatctttgcatgtgctaattagccattcctatatcttcttggaagtgtctattcaaatcattggtcctttgtttttaaacgtagtttcaacttttattttagactgaggaggtacatgtgcaggtttgttacatgagtatgttgcatggtgctgaagtttgggttacgaatgaatgatcctgtcactgaagtagtgaacatagtacccaataggtggtttttcactccttgctacccttcctcctccctctttcctctagtcgtctccagtgtctattattctatgtccatgtgttctcatcatttagctcccacttctaagtgagaacatatggtatttggttttcagttcctgtgttaattcacttaggataatggtttgccagtttttaattgggttgtttgtcttgttattgttgagttttgataattttttatatattctgggtacaagactattcagaggtacctgttttgaatgtttttttccaatctatggcttgcattttcattttccaaatggtgtctttcaaatagtggaaatttatagttgtagttaagtccaatttagcttttcttcttctatgattcatgcttttttttcccctgtcctaggaaatctttgcccacctcaagttcacaaagcctttcttctgttttcttctagaacttttatcattttagcattagtatttaggtttataatacattttgagttaaattttctgtatggtgtgacttttctttctctattgaattcccttggtgcctttgtagaaaattaaatgactgtatataggcaaatctgtttatggattctctagttccatagatgtgtatatctgtgcttatgccagtaccagattgttttgattgttgtaactttatagtaagtcttaatatcaggcagtctaaaacctccaacttacttttttattgaaattgcttttgatatatttaggcttttatatttctgtattaattttatagtcaactagccaactccaccaaatagccaactgggattttgactggaattgaattgaatctgtagatcaatttggggagaattgacatttaaacaatactgaatctttcaatacaacaacatggtatggctttgtttctttaaattttctttaatttccctctaggatattttgtagcctacagagtagttcttgcaagaattatattaattgtatccccaagtattttgagggattcgatgctattgttaattgtatcatttttatttgttttcgttttccaatcatttgttactaaaatatagaaattcaattgatttttgtatattgaccttgttcactctaatcttgttaatttgcattttagctctagtagcgttttgcacttcttttagaatttctacatatacaataatgttgtctgcaaataaagacagtttgcttcttcctttccaaactggatgctttttattttttttttcatgccttactgtactggcaagggcctccagtacaatgttagatagaactgatgatagcagaatccttgtcttcttcctgatttcagagggaaaatattcattattttaccattaagtacaattacttgtaaattttttcatagatgccctttgtcaaattgaggaagtttccttctattcttggtgtgagagtttttatcaagatttgatattagattttgtcaaatgctttttctgcatctattcaaatggtcatatggtttatcttgtttattctgttatggtgaattaccttgattgattttttaatgaggaactagctatgtattcccagggaaaaaatccacctggttgtgacatattacattggtaatattttcgctatggactgaattgtctccacctccccccaccccaaattcatatgttgaagtcctaactctcaagatgattatatttggagatagggcttttaggaggtaaacaaggttaaatgaggccataaggatggagtcctaatctgataggactggtggcctcataagaagagagaaggttctctctctacactcatgcactgaggaaaagccatgtgaacatacagcgagaaggcagccatctaccagctgggaagagggctccactagaaactgaccgtgctggcaccctgatattggatttccagcctccggaactgtgagaaaataagtttctgttgtttaagtcacccaatctctagtattttgttatggcagccctggccaactaaaactgttttgttaagggttttggtggtgatggtggttttttagtttttgcgtctgtgttcatgatggatatttggctgtgattttcttataatgtcattgtctggttttgatataagagtggtattagtccgttctaatgctgctatgaggacatacccgagactgggtaatttataaaggaaagagatttaatggactcacagttccacatggctggggaggcctcacaatcatggtggaaggcaaaggaggagcaaagacacatcttatatggcatggtggcagacaagagagcattgtacaggagaactgccctttataaaaccatcagccctcatgagacttattcactataatgtgaacagcatgggaaaaccccactgccatgattcaattacctcccacctggtccctctcacagcacatggggattgtgggagctacaattcaagatgagatttaggtggggacacagccaaaccatatcaaagagtaagactattctttttttttttttttttttttttgagacggagtctcgctctgtcacccaggctggagtgcagtggtgcgatctcggctcactgcaagctccgcctcccgggttcacgccattctcctgcctcagcctcccgagtagctgggacgacaggcgcccgccaccacgcctggctaattttttatactgatagtagagacggggtttcaccgtgttagccaggatagtctcgatctcctgacctcatgatccgcccacctcggcctcccaaagtgctgggattacaagcgtgagccaccgcgcccggctgactattcttataaaatgagttgagacgtgttcactcttctatttaatgaaagagtttgtgtagaattggtatcatttcttttttaaatgtttattcaccagggaaatcatcttatcccagtgttttttgttttggtttggttttttttttaagggtcttaattgtgaattctatttttaataggtaaagggctatttgaattttctatttcttataggataaattttaataatttcttttaagaaattccatttgagactgggcatggtggctcacacctgtaaccccaacactttgggaggaggcagcaggattgctctaggccaggagtttgagatcagcctgggcaacataacaagacttgacttctacagaattttttttcattagccaagtgtggtaacatatgcctgtagtcccagctacttggaaggctgaggcaggaggatcacttgagcccaagagttcaaggctgcaattaactatggatcatgctactgcactccagcctgagcaacaaagcaaggctctgtctcaaaaaaagaaaagaaattccatctgagctgttgaatttaatagtataaagttcagaatatttccttaccattttttcactccttggaggtatgatttacatactgtaaaaatcacttattttcagtgtggagattcttttcctttcctaaatctccacatttttattgacatatactttacatatcataaaattcaccatttgaaagtgtacaattcagtggtttttagtgaatccgtaaagtgtacaactatcatctttatttaattccagaatattttcatcacctcaaaaagaaaccctgtaatcattaaacagtcacttctaattttcttcctttccccagcccctggcaaccattaacctactttccgtcactgtggttttgcctattctggatatttcatgtaaatgaagggataaaatatgtggccttttgtgtctagcatcttttgcttagcatgttttcaagattcttccatttttgcagaatgatagaggagttaaaataagaaaataaagatatagtaagaatgaaactattttcattttttaatttaaaaaaatcttccatgttgtagtatgtatcagaatttaactcctttttatggctgaataatactccattgtatggatagaccacattttgtttatccattcatctgttgatggacttttggattgtttccccttttggctattatgaataatgctgctatagaacattcatgtacaagtctttgtgtacatatgcttttatttctcttcggaatatacttaggaatataattgctaggtcacatggtaattctatgtttaacttttagaggaactgccagactttttcaaagcagctgcaccattttacattttcactaccaaagtatgagtgttccaatttttccatattcttatcaacacttgttactgtctgtctttttaattatactcatcctagtgtggataaagtgatatctcattgtagtttggatttgcatttccctgatgacttacgttgttgagagtcttttcatgtgtttattgaccatttgtgtatctcctttggagaaatgtctatttaaatgctttgcgtgtttttaattggattatttgttttttagtactgagttgtataagttctttatttattcttaatattatacccttatcagagctatgacatgaaaatattttttcccattctgtgggtagtattttcactttcctaatagtatcctgtgatgcacaaagtttttcattttgatgaaatccaatatttatttattttacccctttggttgcttgtatttttgttgtcatatctaagaaatcaatgtcaaatcaaagatcactaagatttaaacctatattttcttttgagacttttatagttttagttcttacattgaggtcattgatccacttggagttaattttggtatatggtgtgaggaggggatccaagttcgttctacagcctatatagcctgcagatgagcaatgttagtgaccttgaaagtagaggcccaggttgtcagtagcctggcatctaactaaacaaccatttatccattaaagttagccctgttaacaattaatattgagataattttacttaatacactgtgtatattagtgtccatctagcatgcagcctgaggcacagagaataatagtttgagtataaaattgaattgaatggaatacatcattaatttattatctagctttctgttattgtataggcagtcacatgtatttaccagaaaaaagttgatagaatttttattttaatgaaacccttttatactttagattattttgatgctgattaacaggataagctgactctggacacatcctgacagcctctgccaaggtttgaaataaacagctgggaaaattcagttttatattatctgttcccgcagctgctcagtttcttctaaccacaggtcagggaatataataggttttccgattagttttagataaaatgtgaaagaacagttcatgtcaaggacaatggttgccaaatatatttggcaggatttctatattgaatcccaaaggaaatacacaaacaaaaccccacaaaagttaggaaggagtaaaacccaggaaccctggaacattttgtcatttactatgcagatttgcctgaaagtgagacaggcaaataaatcacatgtttctgccagcgtggaaaatattcactcaaatggcaaaggtctcaggctggggagctggatattgtcctgtaataggttcatctcagaactgaatcacacacttggagggtgttaatgctcttaggaacatctagttattccctttgaatagagtcctgtcctgaatcacatatacttgacctagggcctaggcctttttgtttttctgtctcacaatcttgtttctccatcaattatgtgttttcactcttccctcagagagggaaaaagtgtttctgtgtgctcttgatcctgttccctctctgatcttccaatctattgctctataacatattttatatgtgtcttatatcttcattttagtcagaaacatttatttatttatttatttatttattttttgagacagagtctaactctatcccccaggctggagtgcagtggcatgatctcggctcactgcaacctctgcctcccgtgttcaagcgattctcctgcctcagcctcctgagtagctggcattacaggcatgccccaccacgcccagctaatttttgtatttttagtagacagggtttcttcatgttggcccggctggtgtcgaactcctgacctcaggtgatcctcccgcctcggcctcccaaagtgctgggattacagatgtgagccattgggtctggcctttaatcagaaacatttaaagtgaaagcactgtggtaacttatgttgaaataccttagaaatcaatggaaactgcacagagagggggtaggatagacgtagtggaaccaaggatatgatatggaaaaaggagaaaggtagcaaactagggatgagttggtgaatgtggaagggcataataatgttaaatgactgaaaactacataggcttatgttaagactagtgccatggaaatttttagaggtagatgacattagagtatgtttaaatataaattaatgttcttgcagtgagccgagattgcgccactgcagtccgcagtccggcctgggcgacagagcgagactccgtctcaaaaaaaaaaaaaaaaaaattaatgttactggttgtgttccctagatgtagactctgagatgaagattaacatgcaggaattttatttggagtgttcttgggatcaacacctgaggaatcagggataggcagagggagaagcgcgctgccgggtaggctccaggacagccttgctggatcttacagggagctctggagctggaatgaaccttccaggttggaccaacatgtccaggcctctgtgtccctgcactgagcactcatgaagtgctgtccatcctgggacagggcagagtcggcgctgggaagaggcgtggtctgcccagagagggggtggggcctgtcctggaaatgggcggggcatgccctggtagaggggcgtggtctgtcttgggaaggaaggtgcgtggcccccacaggcaacattcctctggggcaatcccggcgcacacctcagcggaggtgaaggctgacttcccacacccaatggctgggactggggagttctttcctagactgccatccgggcgcccctcaccctcttgctgctcagctccaggtcgtcgtgggttcagggctcagctgcacgctcctgcccgcgccctgggcgtgatggcacccccagcccctgccattcttccccctcaccccctctccctgccactgctctgcattgccctgggttagcctggcggggccaggtggcacccgccgtatactcttgcctttctgctgcaggggcctttctgctgcgggtcccagagctgcagggaggggcggcagagactccccacgtggctcattggcgggggtgctaatcagagttcttttgctgccactctttgattcccaaaccccatgtaatcttcttagtggggacacagaatcatctttgaattcatacatatacagcaccttggaggctggccctccatcctcacagagacctgcctccaagctggagttctacctgtgcctggttgtggacccactccctcatctcttttgctgtacaatgattccccaggtctacacggtgctatatggaattccacatcagtgaatcaaatcctctgtaagatttcagatagtggtgctggctaaggccctgaagggaggaaaggctaagttacgccaagattaggtatcacaatgaagtcctgtcctttctaggatggaaggagttcagtgtgtctggccaccgagaagctggtttgtctctgtgatggacaataccatattgcagcaatccccaacctttttggcaccagggactggtttcgtggaagataatttttccagagactttggggttgttgggaatggttacggcatgaaactgtccgcctcagatcatgcggcattagttaggttctcataaggagcacaaaacctagatcccttgcatatgcagttcacagtagcattcgcactcctatgagaatctaatgcagcagctgatctcacaggaggcagagcccaggcggtaatgcaagtgatggggagccgctgtaaatacagatgaagctttgctccctgcctgctgctcacttcctgctatgtgaccccattcctaacaggccacagaccagtactggtcaggggcccaggggttgggcccaatatggcatattgggagctcagcattgatttttgttgctggcaggttggactttggtggcaacagtagctagatcagccttagtcagtgggaagccacgcttttgggtccatgcattaattctctccctgctgctgtagccacttagctcatgtcttgccagtactgcgatggcctatgcagaggctagctgatgtgaattgccagagtcatttttatatgtgttgttggtttgtgcttccttcaagatggatgctttctgttggcattaacgtattacttggagatttttctagtttgtgtccactcactaatatgcctttgtcccaacttttttctggaagagcttccttatcagtacgctgggccctggccctcagccagtacagaaagtcatttgtcaaggccttcagttggcagacgtgctccctggactacgtgctttctcgggtgtcccagaaaccctggaatggagtgaaatgcagggctacgtgggagagcagggaggcaagaattaagtcggccccacctttgcccaactcagtgggtctccttgagagaggtctgcagtttcaaggagacttttcagccaatctgctgcgagatcctgtgaaggggtgtgaaggtcttcctctgtgactatagattggccagtctctccttgtgtgtccaacagttttcattatactttatgtgaattaatgcaaaactgctaggtttaaactgctcaccattttagggatcccttctggattttaccttccttaaggggaaattttcctcctttcctcagttcatcctttctgccttggctttgacgtggtctggaggccacagagcctcctcctgagaacctctctctggtgtgtctgtttgtgtccgtccctctcctttcgatcattccctgtggttcctgttgggcgcggctcccataaacgcacagagcagggtctgctttgtctgcaacctgatgcattgttatttctcaccaaaacttgcagtccaaacatcacatttccgggccacactctttgtcagagctccaggggcacaaccccggggacctgctggaaggtgccaccgtgacgtgtgcctagatgcgttttccctcagttaccacagcgttcctctggttctggtggctggagggtgaccgcgtgcttcatgaagggggtccttactgcttcgcatccacccttttcacggaaagcactttgtcacatgttttcagtgtttctaagcgattttctgccaatcttgtgtgctaagattgtgtggcagcgtttccacagatttatagctggcaatgaattctcccaaaggaaatcagacaaaataaaatgtttccaacattgttcacatactgacaacttatgtgcttccttgggtgattttacaactttttaagcacatgaataaaaattattgtctgcttttttctccttttttctctcttttttttcttgcatgcagaaagtttataggagggggatcctctggatcaacacccatgggggagtgaaggaagcaggattgggtaaaagaagttgaggtgatacagtctgaataaaggtcagtcccacagggagctcaagctaggatggctctgcagagatgttctctattgaggcaagttgtctggacctatatagtcccacctttaccaggaataaggcatgagtttggatgtggtgactgacttcagccaaaattggttctcagagaggaattcagattagagttgtcagctgtcagcacacccagcagcttaggaaataagtgctttagtcctgaagcggtgaatctggacaccagcctccactgtggtccaccctttctgctgctcagattcatttgcttcataagttctggaatggttccttcaggattctgatgggctccctttcctggggaaacaaaagagaaaggtttggaacacagcacaactcctgctgctttagcttttcttgagtctgcaactggtactcatcatcttccccttctactacccattctagatccctccccccaccaccctctcaattcatacttctgctgctccaagtgggttaccagataaggtatctggtcatcatgccctttgtaagccatgactgtacttgtccatttatcatcaacattgaacaagggaatactaagagatacccaggcagatgacctggctgccaaatatattctcctctgtctccattgtgtaatgtcagcccttcctcctgatgatcaggatcggttacgcttgccaggatagtgactcttttccttacctcttggtctcttaatagtgatctgaagtaatatgatggcaaccatagtttcaagtttaatgagactcttggtgtgtccactggcggacatattccccttttaagaaccagtacttctaaactctcagagcccagagttgggataagaggcatagtttccctaattgggtcactgggagtaatggtagtgtgaggctgctcctacttacactccttgttttccaaaaccatatattttacttcgggacacaccccactaaacgatggccattgatctagagtatatactgcatcctgcaggatggtgcctcgtccttaggtattatgtctaagctagtgcctcagctgtgccttcaacaagctgtcctaccactctatcaagtgggtagcttctgggtagtggattccatggtcatgtatcttcttgctttaaagtaggtctcttggtctgatgcagtgttatgtaagatcaaatattctgtgaggccttgaatggtggtgtttactgaggctcaccaagcaactgaatgattttcttgagaaatggtgacatatcagagccttagctttggtctctgttactggcaagttgaacattaacaacatcagtagctagatctgtattgatgagtccatgatgttgggcccatgcatagcctctgccatggctcctcctttcatacatccattttgtaagaattggggcaccaacagcagagactggtaagcatcaaagtggctaagtcattcagtctacttggttgtttagtgctgtttctgtggctgatgttcttttcatttattcattctgtaatgcgtatcctttgtagattcaatttccttctctctgaacaacttctttggatatttattgaaaggcaggtctactgtcaataaattccttaatttttattgtctgagaaagtttttatttctccttcatttttgaaggatactttcacagagttcagaattttaggttgactgttttttctttctctcaacactttaaatatgtcagtgcactctcttcttgtttgcatggtttctgaggcgaagttggatgtaatttttatctttgctcctctatggataaagtgtttttccccatctggtttcttacaacattttttgtctttgattttctggagtttgaatataatatgcctaggtgtagggtttttttatttgtttgctcgtttgcatctatctttttttttttttttttttttttgagacagaatctcgccctgtcacccaggctggagtgcagtggcgcgaactcggctcactgcaagctccacctcttgggttcacgccattctcctgcctcagcctcctgaatagctgggactacaggcacccgccaccacagctggctaattttttttgtattttttagtaaagatggggtttcaccatgttagccaggatggtctcgatctcctgacctcgtgatctgcccgcctcggcctcccaaagtgctgggattacaggcgtgagccaccgcgcccagctgcatccatcttctttggtattctctgagcttcctgaatctgtggtatggtgtctggtgtctgacattaatttgggggaaattctcagtcattattgctttaaaaatttgctcctattcatttctgcattcttcttctggcatttccattatgtgtatgttacaacttttgtagttgttgttccacagtttttggacattctgggcccatgcatagcctctgccgttgttgttggtgtttttttttttttcagtctttttttctctttgcttttcagttttgattggaagtttctattgtcatgtcctcaagctcagagattctttcctcagccatgtctcatcaaccaatgagcccatcaaagacattcttcatctctgttacagtgttttgatctctagcatttcttttttattctgtcttagaatttccatatttttccttatgatatacatctgtcattgcatgttgtctactttttacattaaagccattagcatattaatcatagtttaaaaaattcctggtctgataattatgacattcctgccatatttgactctgattctgatgcttgcttgttcagtctcttcaaattttgtgggttttgccctttagtgtgccttgtaatttcttgttaaaaggtggacatgatgtactggctatgaggaactacagtaaataggcccatagtgatgtggtgagatggaaagaaagaaaagatgctcaacatcactaatcattagagaaatataaatcaaaactacaaagagatactgcctcacacccattaggatggctactatcaaaactaaaacagaaaataatgaatgttggtgaggatgtggagaaattggaacccttgtgcactattgcaaatgtacaatagggcagtttctctaaaaattaaacagaattaccatatgatccagcaactcgacttctggctatatatgcaaaagaactgaaatggggtcttaaagagatatttatacatcaattgtattagggttctccaatgaaacagatccgtgtgtgtgtgtgtgtgtgtgtgtgtgtgtgtgtaaatatatgccaatggtaaaagtacagggtctgagtcagaaggcagaaccaagaatgcttatgtccaagggcaggagaagacagatgtcccagttcaaacagggagagtgaatttgcccttcctctgtctttttgttctattcaggccctcagtggaatggataatgcccacccacattggtgagagtgatcttctttaccaattcacatgctattctcttctggaaacatcatcacagacatacctagaaatactgttttgccatgtatctgggcatctcttagcccagtcaagttgacatataaaattaaccatcatatccatgtttataagcagcattattcacaatagctaaaatgtggaagtactgcaagtgtctattgacagatgaatggataatctaaatgtggtatatacacacaaagcattacgaaagaaggaaattctgacacatgctacgacatagatgaaccttgagtatattacgctaagtgaaataagccagtcatgaaaagacaaatgctgtatgattccacttatattgggtacttagagtagtcaaaatgatacagaaagtagaatggtggatgccagagactggaggaggtgagagttattgtttaatgtttatacagtttcagtttacaacataaaattaattctggaggtagatgggagcatattacacgttttctttttggagatgggatctcactctgttgcccaggctggagtgcagttttgtgatcatagctcactgcagccttaactgtctgggctcaagtgatcctcccaccccaggcaccaaagcagctaagaccacaggtgcacaccaccacgcctggctaattattattatttgtagaggccaggtactgctgtgttgcccaggctggtgttgaacccctgggctcaagtgatcatcctgccctggcctcccaaagtactgggattacaggtgtgtgccaccacacctggccagaatatttaatgctactgaactgtatatttaaacatgcttgggctgggcatggtgcctcatgcctataatcccagcactttgggaagccaaggagggtggattgcttgagcccaggagtgtgacaccagcctgggcaacatggtgaaaccctgtctctacaaaaacattaaccgggcatggtggcacacgcctgtagtcccacctactctggcggctgaggcgggaggatcactcgaacccgggaggtggatctcgccactgcactccagcctgagcaacagagtgagaccctgtcaaaaaaaaaaaaaaaaaaaaaagatttacgatagtaaattttatgtgtattttaccacaattattaaaattgaagaaaatccccatgggtcactggtttaccaatttagccattttcaccatttttagattgcattttccttctctatctcagcattctgactaaaggaaaagcaaaatttcttacaagaatgaatgattctccagtgtggctgctcctgaaaggaacaatgagacttttgttatttcaccacaagactgagaaagaaataaacaagtgataaatgcccagaccccttcttattcattccacatcctggtaatctgaggcatggtgtggcttttactccaagcatatgaatacttacaatcagaagctgcctctcctttccctcactttatcattattgccatcatttatgacaatggagggagtgtctcactggatgatatttggggttctttcttcagtggtccgccataccaagcatttatttgtgctgttctccatctttcacatctaccacttttcaaaagtccctgagagtcaataagacatgcgactcgaacaactgcttcacatctaagtgtatgtctttaaaaatctctccttttccatgtttatgtctgatgtgttttgttatggcaaagtggcatgtagtatacggttcataagtgaatcgatgtatatctgtggagggcaaatgctcaattttagatctacacatgaaagcttttttccagggcaggagccttgctttctccaactaagccttaattacccaaatgcccatgtgttgtgcctttggcttgttgaaatgataccaactggtaaaatctgatgggagataaaagttagatgtccagaagcataaaagtcaggaagagaggctctttatggcatagagaaagctgcagaactgctccatggtgtgcaaaactcatcagcacatgaaactagtgagtggagatagtcaccttcaaccactttgtaatttctaccaattcacttggggccagtgtcccttattcaccaagattcacattggtccttttgattatttggcgtgaggaggcccccagacatgctaaactgtcatgcagggagagaggaaaagttgggaaccagcctttgcttaaaagggctttgacaatggaggcaaataataacattttgggaacatttatataagtaattatataatttctgattcagtagctggttcatgaataaatgagtaattgggagtatctgagtggagacaagaatgaacattaatgtaggactgattctgaattacagcttctggcactagtaggtttcaatatacatagtctgctgaaaggtaattttctctgtgatattcctggtatccctaaggagggaagtataattttaggtacatactgacaaaatttgaacacaaggtacttagatgaaagttatagtctgttttagagatgaaattgaaggatgcagtagctattgctttggcaaaggatttttggctgatgcagtgtatggttattgattttatgattcttatcatatggcacctaatgtatcagttgagttgtgaaaacagtgtttcggtttaatggatgttagggatttatatacaacttcaaatttgcctccttgctaatagtagaaaagagtagtatggaagcattacttccagctgctttttgaagtgtccaccaaaatgaacgactttttcctttcttcacgcagatttcctcctagagtgccaaaatcttttccattcaacacctcagtcgtgtacaaaaagactctgtttgtagaattcacggatcaccttttcaacatcgctaagccaaggccaccctggatgggtaatgaaaacaatgttgaatgctatttatgaaattgggtatcttattttctatcacagattccccaatcttgaggttgcagttaaaaagtgcagctgccaaagagaatgtttccctaactgctacctatagggaaatacactgactgcattttctgtctttttgctgggccgtcttcctctgcttggtctatgccaactgcttacctccacttagatgtcaaataaagtatgtaacaacatgttatgacaggacattttctgtcttagaattgttgctgagaattataggtgggaagtatccccttattctaaagagagatatcagcctatcgatttagaacttgttcaggtagtagtccaaaattggttctgcaacccttaggccctgactcacctccaaccttgtataaaaaaaggctaggaacttatggaagactttagatttgaatatttattatttggagagcctcttcggtgttttatgtgttgcttaccccatggggagtgggaggcctgtccctcatgtcaaggtataatgaaggaggcttcaggagaaccacttagaagactggacaaggtacctatggaacttgggagacactgaccactgcctggtttttatctggataaattttcaaggtcagaggccaaaaggacttctcctgatggaatagcagggggagtgggcaatagtgggagctaactgcactaccattgttaggtgtaaggccaggaaggtcactgaatgggacttgtcttacaaagactctgcctgagaggtcttcctgccaggattagataaccccaatagaaaaagcctgtatgggttgtactgccagaagcagaatctgagaggagagatacaagtgaccagctggagaaggtatatcccatgccaagatcaggagcagtggggtgtctccttgttggcagggagaggtctccaaataactcataagttccctaagaaagaaaggcagaattttggtatgtgtcacaactagggagtactaatgccacattatcactgctccttccaagaaagactttgtcattgtgcctatttgtttttaccctcccccctcctttccacttgctcctaccttggcaggtccagagacacaaaggtgagttggggaggaagattaggagaggaaggtgggaaagcagcgaagctgccaaaacaaattacctttacatattgcagatttctggggctgtcagaatgtagctggagaaggaagggaacttgcaattgcagaagacatcaaaaatttggtattagactggactggacttgttagaacctaagagtgatactgttggttaatacctgaaggttactggaaaagatttgggatcaaccaaagtgcaagaaaagggagatctcacataaagtaattaaaagcagtggtctaagaaaaataaggctattttatgtttttatcccactcaatccagttcattcaacagactgtttataggcattttatacttagtgtattcataaaacagagctcttaattttcctcctgattttctgtcatggcctgactaacaacccagttgcacaagccaaaatcataggagttttctttgactcctctctttttttctatctccacatcatatttatgagcaagtcctgttgactgttcctccaaaacaagttccaagtcttcttattttacttcttgtaaaatccaaattcatccaaattcctgtggcctgcaaggtcctacatgttatgtttcctttttgaccatattttctgttactcctctgctgattcactgtgcttcagccacactttacttgactataccaaacttatttctgcctctggacgtttgcatttgttttatctgttttcaatgctcttccactagatctttgaaaatcttgcttctttttcattagtcagatctctactcaaatgtcacctcctcagagaggcccttcctgactactacactgaaagtatcctctacctcctgcctcatcactttctagcagaccactatcttttatatttataacaacttgaaattttcttatttatttctttatgtgcttaatgtcttgagaatatgatctccattatctgtcttgtttgctactgcacctccagtgcataagacagttcctagaatatagtaggaactctagttgaatgaatgaatgaattgaatgattgccagaaatcttgcctcagagcaaccataaggttaggctgatgttggcagcaagcaaatactactttttgtcagtaattacaggggcatgcttctccactgtgaccttgactctaacttttggaataacaggttttctggagtactatccccaagtaacctttggcggacatctcattcttacaggtctgctaggtcctaccatccaggctgaggtttatgatacagtggtcattacacttaagaacatggcttcccatcctgtcagtcttcatgctgttggtgtatcctactggaaagcttctgagggtgagtaaaataccctcctattgtcctgtcattctatgaatagaacagtgagatgtgtgtgctttgtaatggtggcgttacaactcttttaaggtcctaactgaacattatgtgtatttcttaacatttactagattataaatatctcaagatagggaaatccatcttatttattgctgtgtccttagcatataacatattgcctaccctatagtagatactcaatacaagaatgagggtgtagtggacaccagtcattttttcttcctaaaattaaacatttctcacctgtataccccctaggaattgcttttctgaatatacttcaaacagaacctgccattttcttaaagcccatgcctccctagccatagcagttgatctaggagtgagcagttgacacgggtatcccacctccttggccacagttgattggtccagagatgggcaccttacccaagctaggccaatgagagtacttgcactagcattttgaaatttatgagaaaaaggacctattattaccaggtaatcctatacttaggggatggagcccaaatataataaaatcaagattctactacttcatgtatatcatgtgggccatggatcttataggagtcttaagggggtgttggtcttgtccttttcttagttgcctagctctttgcaggcatggtgcaaaggcaggacaatctacctttatctgctccttctataccactgatcctaccctaaacatgtagctgtataatcagagacaggaagccatggcaaatctggagggtctcggcttggctatatcttaaagagttacatgtattcgtagttcaacattggggaaattttccaaaaattggtggagaaacgagtggccaatgcaattttatctttttttttctgctgacatcagggagagataagagctttaaaatcacaattatggggagataatattttaaaatccagctcaagttaaacccatcagaaaaggtaacaccttttgggacccccaaatggccacatcttatccaatgaggggacaccaaccatagagtctatactgcacagttcaaatggtagccatgagctatcaggcacttgaaatgtggtgagtcctacttgagacatactgtaaaatatacaccagatttcaaaggttaagtacaaaaaagactaaaaatatctcattcattgtttataagtacaagttgaaatgcttatatttggatatactaggttaaacgaaatacattattaaaataatttcacctgtttctttttacttttcttaatgtgactaccagaaaatttaaaattacatatgtggtttgcattatatttctattgaacagtgaaatgtttagcatatgttgaagttgctgctcctgatgcagtggctcatctcagatttggccaagttcttctgtccaaggaaaactaggttcaacccattcctggagaggaacagactcaaatctttctgggctgggtcacttaccttggttaaatctgttctccacctattctaccaacaaccaaagggatggacatagctgaaataaaaatcacgcaatcacactgaatggtatctcacctcaggtgggccttcagcattgcctagccattctactgctacatttcccctaatccatttactctccctctccccaagacagctataatgtttcacacattgttagcctctcattgaacctccaacatgtgctcccgcccctgcccccaccacaacgtgagccttgggaaaaagggtatttttttcctaatgaaatatttcaaacaaagataaatacagaaaataatataacaaacaaacatgtgcccatcacctcactttgccaaatcttaacattttgtcatctttgcttaatttattttacaaaattaagcattttacatacagtctgtactcctctatggggctggcaggaaaaggctctcattgtcaaagttcaaagtaattgatcattgaaaaaataatgatcacattaaaaacaacacttatataatagagatacatattgtaatactcataaatgaaatgatatcctgtctaggattggcttcaaacacatccaagctgatgttacaatcattaggtgaattcctgatgtggaatttgacatttgtatggcgccaaaataatatcccagtgatttttttctgattgtaagtggaaatgttaactttagaatggaggtatcaggctaatccacaggtcagttttagtgtcactaaggatgggatggccagatattatctgcccctgatatggcacaatatgagggactcagcatcatctttgatatattttagccaaaaaacttatttaatttgaatctaatcagaacttaggcatattcaatagcatgggatattctacaggactacaagccaaatttctttcaccaaatgagtgtcagaaaaaaagggactactccatactaaaagagactatgggcctaaacaaccagatgcaatctgcagtcttaggttggattctgatttggaccaactagctacaaaggatgcctttgaggcaattaagaaaatttgaatattgcattgatattaggtgatattaactggatcaggtgtgctagtgtcattttgtttatgtgggcaatttttttttaaagatgacttctaaagtatataggagtggactatcatgaaatttgtaatgtacattaaaatgcatcatcataaaaagtgtgttgaaagaaaaaagtgaaagtagcagtgcaattctaagaataattttctaacatccactcacaaaaatattaaattctttatattaaacacatgaaaaagaacacaaatatatctgtctttcaagattcatctcaaattccacctccttcatcaagcattactgaagagtaggaagcttgtttactttttttatccactgtgttgctcgctccaagggcatagagacttctatcttgatctttatattttcagcttgtagctgagtctggtaaagaataagaactcaataaatatttgtgaataaataggtgaatatttccacatggtattataattatatctttatatgtctatgtcccccaccaaacatagtgttgtaccactaggaaagaacaaagtttaagaaattttcttaaatctctctttcttactgttccgtgaccctcactagtgcctaccaaagagtctgtgacaaagtgtatttgttgttgaattgaattaggcaaaaagatgcaataatggaagcaatttattatttaacagaatgtggagatatcaaccagaacctagtttttactgctcatgctagggttagtgatctcaagatcctctggagtatatgaagcttctccccatttgtggctgctgcttgttagtttttcaaattaagatgcagaaagtaggccgggtgtggtggttcgcgcctgtaatcccagcactttgggaggctgaggcgggtggatcacaaggtcaggagtttaagaccatcctgaccaacatgatgaaaccccatctctactaaaaatacaaaattagccgggcatggtggcacgtgcctgtaatcccagctgctggggagtctgaggcaggaaaatcacttgaacctgggaggcggacgttgctgtgagccgagatccagcctgggcaacagagtgagactccgtctcaaaacaacaacaacaacaacaacaaagatgcagaaagtccgtttcttatgtagaacctattggtgacaataaacttgacatgtttctttgagtgtacagtggatatagaaaggacaattttatttcttcctgctataggagctgaatatgatgatcagaccagtcaaagggagaaagaagatgataaagtcttccctggtggaagccatacatatgtctggcaggtcctgaaagagaatggtccaatggcctctgacccactgtgccttacctactcatatctttctcatgtggacctggtaaaagacttgaattcaggcctcattggagccctactagtatgtagagaaggtaagtgtatgaaagcgtaggattgagatgaaataagcagagaagtacaaacaactgaatctatctataacagttagcatttgtgttccttcacctgaaagaggcttttttactctagcatcatgctcatggaaaggagaataatccagtttctgagagaagcagatatgcattctatataaccacaataaactctaagctgggatcaggaggagctgagttccagaattaaatctctctcctcaaagcattgctattttcctcttcaaatctgtgggctttatcagtagtgatttctactgtcctctgccttttgcaaactttgagctaggttccttgaaaacttcatggaggtaaacacatccaagtgtgtgatcaatggcatatagactggttcaggtggttagtttgtcatctgtaaaccaaaagtatataaaaatctaagaaaagtcagcatttatttatatgttactgaaaattaattaatttggattgaattaatatattctaaaataattctaatcaaacctgtttttaatttataccttagcataaattagggaagtaaattttgcataatttgtttttatcctattttttatggtgaaatcagcttcactgtaccttttccttgttccatttatcttttactgcataactccacaatttagtggcttaaaacaacaacagtctcttattatctctcatggtttctgtgagtctcatggaatttgtcagtgttttgacttggtggcctatctaagtgtgtctcatgaggctgtagtcaaacagtggctagagctgaaatcatcccaaaggtgactttattcacatgtctttgaccttggcttgatggtactctccacatgatctctctcacatgggttttacagggtagccagacttcttatatggtcctgagatagcccattagaagctgtttcacgatttctaatgtaaccttggaaatcactcacataacctacattctattagttagaatgcatcactaagaccagtctataaagggagactccaccttttgatggggaataggcaaagaatttattaacaggaatcaccatactctttctgaatggtgatgatgaatgtgattcaaaaaaaggatgggagcggggagtggagaagatgagaaaggtttgtagtttataatagtttcagatgaaagtatgatttctcatatactgagttcagtttcatagtcataattaatgagaaagtgccaaaaccacagtgtattatttatgggatgtaaaggctaatggaacaatgagatcatcaaaacattagtgtttacatatgacatataaagaaataagttaaaaacccaaatgattctttgacacagagttgaactaaagagtctacagaggttctagttccaggtgaaatggataaacacactccaccctttatttcccattgaacttaactataaaaccttgacaaaatgcaaagcccagatatttaaaaatttctaaaaagcaaatagaacaagtatatagagaaaagacactagaattgaaagtattaccaaacttgtgggggagtatacctttttccccactctagtattccttaacctgaattaaaacataactggagacttcgaagtgagtactatgttgcaaagagagctccaggacaaaccctctggggtttcaaggagtgagaaaggtaactctaaatgctcagagagcgtgggaggggaaatcccctagggtttttgtcctcttttccaccattctctcaagcttcagtcccaggttgcctgtggcaatgacagtggctggcaacagaaacctgccggagtaaaaacttagggaggggaacattattcttcattcagtacagctacagatctaagacattgggggaaaagcacattactttctctctgtctttccccttccattgcttgaccttagctatgatgtagttgtggaaattggaagcttctggttagaaaaccaaaaaagggagctcacagaactggaaagtttatagatgacagagagaaaagatcccaggaaagtaaacccataaagttgtgcattaactcctggattcacccccaacctacacatccaggtatgtagtttcagtgtcagatctgttttaaaccccttgcagtgccattgagtccaacgcagtggccagtctggtgcttgaggggaaatctcagtttcacagtcttcaacatgttccattagcctttacgtcccataaataacacactgtggttttggcactttctcattaattatgactatgaaactgaactcagtatatgagaaatcatactttcatctgaaactaacgcccacagaattccttaaaacatgtctgatggctgaaagcaaagatagaacattgtgagataggttttttaatgtatggtagatacaatacataaaagaatcatagcataacaagaggagggtaaggaaaactttatggtccattcaacttcattccaattcaaatggtaaaatgttgactctaagtagatgatagtgaaaggttaagtatgtattttgtaatccctagagcaaccaataaaaaattataccaagagacacagtaaaaagtcacaataaactaattacaatggtatatcaaaaatattcaaataactcaaaagaaggcaagtaaggagagatgaaaatcagagagaagaagcagtaaaatcataataaaatgataggcttaaatctaaacatatcaatacttacattaagtgcaaatggctaaaacacaccaattaaaaacagagattagcatactggatataaaagcttgaaccaattatatgttgtttacaagaaactcatttcaaaaaaatgatataggtaggttaccagcataaagatggaaaaggatatatgatgcaaacatgaatatgaagaaagttgaagtagtacaaatctgtaatcacaacattgatttttgccaggagtgccaaaaccattcaataggggaaagaatagtgtcttcaataaacagtgctgaaacaggtgaatatctgcatgcaaaatactgattgagtatcccttacctgaaatgcttggaaccaagaacgtttcagatttcagatactggaatatttgcacatatataatgagatagcttggggatggaacttaagtctgaatatgaaattcattttggatataaatcccttgccagttatgtgattggcaaatattttctcccactctatagtttgttttttcattcttttaatggtgtcttttataaagcaagagttatatggacaaacatatgaaaagatgttcaacatcattaaccattagggaaatgcaaattcaatcaacagtgatgtatctattagaatagctaaaataataatataaaattgccaagaatcctgtcaagaattcagagcaacagaaagtttcacaatgcacaatggtatagccattctggaaaacagaatggcagttttgctgcttggtagagaaacagtctctggcagtttcttgtgaaattagatgtacactatagagggatagcaggagggagttctttttggatattgaaatggatctgtatcttgacgatgatggggtttcatgagcttatatctttgttaaaagttatagacctatacaccaaaagaaaaagtcaatttcactataattgaaaatttatataaaagtaattagaatgttttaagacagctttatacgtattttaaatgtgtctctaaagtttttaatccagtacttctggtaaagatggcacagggtcttcctacttagccatttttccatcctccacctcaaccccaacctcgctgaaaaccaacaacaaagataggtaaaccataaatagagaaaatcgaataggcatggtcagctgaaaaagaagataaatatttgtggaccagaagcagaacaggaactgtgagtagtaaaaggggtggaaattacaggccaactgagatctgggtcaggaagccagctgcggtagccaaggagtcaggatgacaaggataaatagtgctccccaccagagggactgagagcccatatcatagagttgggctcttcttcacttgaaagagagctgagcacagctgctgctcactctttgtttagggccatggctttgtggaaactcagagtcctagaagaggggaaagcaaacccagtcctagaataggaactgaactaagttttcttggttcagtgggggaatctgcaatatccccaaggtttccattggccagtatctccaaaattccattctagggtatgatttgctagatagagaatagtgaacacatcctttgcttaatcaaccaatgatcacaagggacagcaaagatcactatagttcaacaaagtcagatttattggctcatggcaacaagagactgtggacacctccctaaacaaagggaaatactgtatagagttagtaaagaattttggggaagggtggaggttaggtgatatttaaatgaagcaaagtagagttgtgtgtaaagaaataaccatgaggtctagactgtgaagtgttctaaaaagttaacatagacatgaaaggttaagtcaaggcaccccttacctgaagcttgagctttaaattgagctgcttctttgtgtcaaagtaatttagatgacctaggaaagaatgagatgtttcattcttgttgctattagttcaaacatttctggcaggctgtgaattcagagaacaaacaactcaattgagtaagaaagcaagagataatcaaagcaaatagttggcattcagtgagtttatacagtggcaatgtgtccttgggagaaatggtgttgttaactctgcagttagctttatctatgtctcttatcccagcctgatgagtagcagcacacgtactgttgctttcttagtccaagctaatttttatttctaagcattaagggtgcgagagagagaaagaacggcaaaatgtcataaacaaaaatctttctactcaaaataagcctgtaaacaaaagtttccagtcaaatttaaaaaatatataattctaagaaagatagccaacaagctcaacagttaaagcatgaaacaagctagtttgttccattaaaaacttcagctatcgatatacacggtatttatttaaaatgtgagtataattagaagcactgtgggctattgaaaaaaaatcatgagtatagatgtttaatatggacaattgctattttactcaaaacttttaatttacaattgcagaagtataaaaagttacaagagtaacagaaattatctataatttcactattatcacacagtgtgtgagggcttgtattttgtaagtgtttttaatttttttctttagtaattcatttttatcatattttacacaagtagtggtcttcatcaaagttgaaataaaaaaattctttgctccagatagttttagaaacactgctataggagacctgacatcaaagccaagttatcaagagacagaagactacatttgttcttactgtcaagtaactgatgaagaactgtctcctcctagtgacaatttcctacaatgagattttttaaatagaagataaatgttctcacttctttttcagggagtctggccaaggaaaagacacagaccttgcacaaatttatactactttttgctgtatttgatgaaggttagtgagtcttaatctgaattttggattcctgaaagaaatcctctgctactattaagaggaggtgattatagaaagatcataaattacattactgttcaggaatgaaggagatggggttaaaaatgaattccaagaaaacaaaacgtaacctcagttccactggcagctatgaggtaagaagatagaggagctggataacggactggcctcatccccctcattaagactgtcaacaaatactttgggctctactttctaaatactttctcttatcttcatctattattaagtgcacaacctttggcaagttatttaacctctctgtgtctcggtttcctaaatggaaataatagtacatttttcataagattgttgtgagtgctgagtgatttcacttaagtaacctagagcactgtgtggcatagagtaggccctcaatagtgttagtacctccgcctcttcctcctcctcctaatgtaatcactatgtaatcatagtaacataatattcttcttgcccccttatcaatttacattgccatcttcttaattgaggccctcatgatctgtctcataactctcaaaggaagcttactgaagtgagtatctgatcttgtcactctagcctctacaatacttcagtttgccagtttcggtggctcatgcctgtaatcccagcactttaggaggctgaggtgggcagattgcttgagcccaggagtttgagaccagcctgggcaacagggcgaaaccacatctctacaaaagaattaaaaaatcagccggtcatggtggcgggtacctgtactccagctacttgggaggctgaggtgggaggatcacttgagcccaggaggtgaaggttgcagtgagctgtgattgcgccactgcactccagcctgggtgataaagccagaccctatctcaaacaacaaaacaaataaaataattcaatttcaaggtaaagtgcaaaatgcattatctattctctggtgacatttccagccttgttgtgttccatttcctgccttatcttccatgtcacccaaatatgtaatgctttttcttgcatgagacctctgcatatgcagtttcctctgcctggaaaaatctgtctccctctttacactaagtaagcttctcctttttctttaagtctgacttacttcagttatccccttccttaattccttctcccaggatgacctctagtctggattagatgcctgcttatatttccacagcatcttgagcttattccttatcatactatatcagtattttctactttatttaatatttatcttctttgatctcatatctttttcccttcaagcaaagtgaaatttcttctcctctctgctccctgtaacaccctactctcatctttattatatcactctttactctttattataattatcagcttctctgacgattccagctagagtgtaagcatcttgaaagcagaggctgtatcttcctctctatcatcagtgtctacaattagtagtgctcaataaatatgtgtttgaatgaatgaacaaatgaatggctgcctcataaagttttagcactagctaccagtccttcacacaaaggggtaactccagggagtcactgttcaatagtatttccagtgcttcagcccttatcaatttcagagacagtgttagggagctttcaggttcctggggtttcataaatataagctgggatgaagcaattataacggagacagggactgacagacagcctttttcctaggacaattttcttttttcttttcttttttttttgagatcgagtctcactctgttgcccaggttggagtgcagtggcacaatcttggctcactgcaacgtccacctcccaggttcaagtgattctcctgcctcagcctcctgagtagctgagattacaggcacatgccaccatgcccgcctaatttgtgtatttttagtggggatagggtttcaccatgttggccaggctactctcaaacgcctgacctgaagtgatccacctgcctcagcctcccagagtgctacgattacaggtgtgagccaccgcgcccggcccctaggatgattttcataagctttcttttaaataattcagctaataaaaagaattgaatcctgatgcctcaagctaaccaatattctgtcttctattattatccattcccacttattgtcatggacaaatggagggagagaaaatcagtttgagcaagagatgtctgcctttacataattatcttctccctccctcacactgactttgagaggataagtgctgtgtgcctactttgctgacaaaaatgcttaaggtgtgagcacactgggagcagggaaggagaaaggggaggcggtcattcatgagacacatgcttagctgactctatctttgccttctctctcatcagggaaaagttggcactcagaaacaaagaactccttgatgcaggatagggatgctgcatctgctcgggcctggcctaaaatgcacacagtcaatggttatgtaaacaggtctctgccaggtatgtacacacctgctcaacaatcctcagggtcttccaaattcagcaccagagttctgtacttcagttcacaaacagctcggcatctcagaggatatagcccactgaatacttgaagatctctggcctctggggatcttaatgtatagtaggcaattcctcttttggtcacctgaaaatgaaggcttacccatgtacatacagcccacagtcagatttttctttccttttcttaaatgtgagtgggcaaccaaggatgaacagacatttaaaaagaacctaaaatatggaagggatatgcaaagatgaacaaagaaaataataatcccagaataaaaaaagctatggctcagaacagaactcatcggaagctcttacttctattttcataaagattcaagaagatactgcatcaataaagtaacaataagatgccttccagttttaaaataggggcatagaggcaggctggctttactccctctcacagaaaaccaaaaccaaacatacagcaccaatatctacaccaacaacaacccagagctcacatgtgaggatgagacagttcccggagccacagagaagtgaaaaaactttgagaatcagacttccacatccatgactctccttcctcctattctgcccagcaccaagtgtatggaaaatctcccctcaactcatggtttctacactggaaaaagtgacattgaggtgttcaaccagcttctccaccttcttgggttccctggggggagatttgtccttgccttaacccacagaaaacatcatgactgtctgaaggcagaaatatcccagagtacaggcagagacaaatgagggaggaaggactaccatccccagccctggaaattctgctctataatttggccaaagacatgcaaattcagaatggccgtgcagcagcaccatgctgtagcaggtttatcctacaggtcaccttggcatgaatcactagctggccttccaacactgctatgataatccctttgggacctcacccacttgggacaggcagggctctgaccacttactggaacacctgtaatcccagcacttgagctcagcacaataacaataggagatggctactaccgttaattttatgcagttacgatttaatactggatctttacgtttgtttacatttgtcccaactggcaccttcatcacctccaccctccccaccccagactatggtaaccacgattctactctctattttcacaagatccactcttttagctcccacatgtgagtgagaacatgtggtattgccctgcagtgtcacctatgttgatgcaaatgaaaatattcttttttatggccaaatagtattccattatgtatatataccactgaactgtacacttaaaaatggtaatgatggcaaattacatatgtatattttacatcaataaaaagaaacttaaaaataaggtaacaataggattctatgaaaaacaatcataacaaaacgtgctcataaaaattataaacacaatggtcaaaatagaaactcaatagaaagtactaagaatagataaaatctttcataaggtcaaacaaaatgtggttgagaatatagttgacccttgaacaatgtgggggttggggtactaaccccctgcacagtcaaaaatccatgtataacttttgactccctccaaattcaagtactaatgacctattgttgatcagaagccttatcaataacataaacaacaaatattttgtgtatgtattatatgctgtatattttcaataaagtaagctagagaaaggaaaatgttatttatacttttctctgcttcttgggagtacttccagcatcactagtggcactttatacgggtcccaagtatccttcaaagtttatggagagatgaaatgcttatgcagagatgattagcatcatgcagagttttcagtggatgcctgcagcactcgagctcagcacaataacaataggagatggctactaccgttaattttatgcagttgcgatttaatactggatctttacgtttgtttacatttgtcccaactgggaatggtgccatgtatggttgtaagtatgtaagtttttataaatttcaactttttataatagatttttgtatattttatggtaataaatgataaaatagtctagtatcaacatgtatatgtatatataagtgtgtatacatatatatatatattttttttttttttttttttgagacggagtcttgctgtcgcccaggctggagtgcagtggcgcaatctcagctcactgcaggctctgccccccggggttcacgccattctcctgcctcagcctcccgagtagctgggactacaggcgcccgccacctcgactggctaattttttgtatttttagtagagacggggtttcattgtgttagccaggatggtctcgatctcctgacctcgtgatccacccgccttggcctcccaaagtatatatatatattttttgagacggagtcttgttctgtcacccaggctggagtgcagtggcacaatctgagctcactgcaacttccccctcttgggttcaagcgattctcctgccccagcctcccaagtagctgggattacaggcatgtgccaccacgcccacctaatttttgtagttttagtagagatggggtttcaccatgtttgccaggccggtcttgaactcctgacctcgtgatctgcccgccttggcctcccaaagtgctgggattataagtgtgagccactgcatccggccatctccatatattttttgcattcataacatacctttttcttaatttttttgatatttttaccctatgtggtccatctgacagttttttcaaattgtcataaatttccaaaaaaatctcactatatttattgaaaaaaaactgcatataagtggactcatgcagttcaaacctgtattgttcaagagtcaactgtgtgttttaaagcagattttaacatcaagaaatgatagaaaaatgataagaattaaaagagataaatattcatattagaattgcccatcaggagcttctgagtagctgaacgcatggaggttcctggagagtggctggccccatgccccttcccacatacccttccttatatatgcatctcttccatctggcgtttataagaaaaggtgctgactgctgaattataaggacactgtggtctactagataaaggttgaggagaggggtttgggcttctattgtcttctttccgggccttcatctcctgcttgtgattaagtagtgcatgctgagtggagcaaagtggtggaataggactcttcagcaataatctcctcacagaaacatcaaggtaacaactcgatgcgtgaaattaccttcagaagagttaagaaaacctgaacccatgagcaagactgtgaagcccttttggactgcaaagacgagtaaaaccatagttgcacataaaggggattggttctttatgactgagaccccacccgcaagccactgcagtaccacaggcggaaagtcaccatggacccacggtttttacaccggaaaactctcccgtatggcctgagtgccctctgtggatctccactaattagtagcagagccagcatgagacttgcgtctaacctgggctcagggcgccctctcgtgctaaaaggaaatacaacagccagtcctttcactttctttttgatatggtctctgttgcctaggttggagtgcagtggtgcgatcatagattactgcagtcttgaactcctggctgggctcacacggtcttcccacctcagcctccagagtgggactacaggtgtgtgccactatgcctggctaaattttcgggttttgtgtgtggggtggggaagattggggtattgctatgttgctcaggctgggtctcgaactcctgacctaaagcaatcctccagcctcagcctcctaaagtgctaggttacaagtatgagccaccacactcagccccactcaatttctaaacgagctcactgaaatagagcagtcacaaacaaacccagactgtgaacatgagaataaatacctaattcttcaatgtgtagacagggatgcacatctgcaaagaataagaatagcctaagaaagacagcctcaacaaatgaacaaaaaatcgtgccagtgactaatcctaaagacatgcaggtgaatgatctggtagacaaagaattcaaaatagctattttaagaaaactcaacaaacttttataaaacacagagaaacaattcagaagtttatcaaagaaatttaacagagaaattgaaggaataaaaaaagtcagaaatcctggaactgaaaagtataataaaaaatgacacatgcaatacaagacatcagcaacagaattgatcaggcagaagaaaggatcagcaagctcaaagacaggttatccaaaaatacaatcaggaggggcttcaggatggttgactagatgcatctagtgttcatcccttccatggagaggaaccaaagtagcaagtagataattatactttgaataggtcatctaagagagaacactggaattcaacagagcagtgacaggaagcattgaaagcaagggaggagagagaaataaggcctgtttgcctgggattggctgggagtctggaacagcttcctaatgtggggaaaaggtaagagacccttagtgttcctcattttcaccaaggactcttgcaatcctagccacaggagagcgccttattccttgacagcacagagactagcatagggagttgcctaaagaccgtgtgaaggcattgcaacagagagctcacgctggattctgcaattctcccaagcagctgcagcacagcaccattttgagaacacagcccacacatcctgccctgctatgatggccgtgacttaggcaggagccctgagcagtgatcctgccccacccagcagaggagtgcccatgcattttcacatattccaagaacaaattccactacctacaaccactgctgctgcaggctgctgtggggccaaaacactagtgaaccttgtgctcccaagctacctgcctacagctactccctgagaaagcaaccccaccttcaccaagagcagggctatagcacagctactgctgcaccccaacctgagcattttgctagtgacctcggtatcaccccacccctgcatagcacaaccagcacctcacacaccaccaaggagcctgagggcaggttcacgtagcccagctctacctgcccccagtacccaagcatatcatccaggggcctagggatcacttagccctgtccaccactggtggcacctgagcacctcctggggtctgaggtcaggcccactcaacctgccactactgccacagttagcactcactgcatgcaccacttgagggtctggagactggccatgcgatccatagcagccacaaccaacgccagcacagaccacttgagattcaggttgtttcattgctatgattgccatcaaccatgccactttgctgcccaggaacttgagaacccacccacccatgtgatccatcaataccacttctggcacccaagtaaaccacttggaggcccacaaatcaacctgcctggacctaaaaccagtgcaatcatatgccaccatggtacaccaaagacaagcacactcagcccactgctgccaccattggggcctgaagacaggcctacctggcatcccacttctcagaaaaacttcaccacagcctccactaataaccacaccctaagccactgagaaaatcacaaatatcactgatgctgtttagaatcttatacagaggctactacattcaccgagaatcaaaaccgaagtgctctacccaagcaacaccacagatacatcttcaggaaaaagttctttcctacaaaagcaaattttaaaaattggaaaaagtgattattacaccagatgtgcagatatcaatgtaaggacacaggaaacatgaaaaatcaaggaactatgacactccaaaggagcacaataattctgtagcaagagatccaaataaaaaaaatttaagatgggtacaaaaaaatagaaagaatgaataagacctgctatttgatagcacaacatggtgactatagttaataataacttaattgtacattctaaaataaagagtgtaattggattgttaataactcaaaggataagtgcttgagggtatacatacctcattctccatgatgtgtttgtttcacatcacatgcctgtatcaaaacatctcatgtgttccataaatatatacacctactatgtatccacaaaataaaaaaatcatagtttacaagcaaaacagtatatgtgaccattggtttttaagtaaactggccaacatctctttaaaaatttatgaaatcctggaaaaataattccaaattttgatactaaataaactcagtgagatacaagagaattctgaaaaaaatacaaagaacacagaaaaacaattgaggctatgaaagagaaatttacccaagagatagatatcaaaaaagaaccaaacaaaaattctggaaccaaagaattcattgaatgaaatacaaaatagatttgaaaggttcaacaatagaccggaccaagcagaagagtatcagaactgaaatacagatcttttgaaataacccaatcagacaaaaataaagaaaaaagaattttaaaaaatgagcaaagatttcatgacatattaggcactataaagtgaccaaatatttgaatcttcagtgtcccagaaggcaaagagaaaatgaagaggttagaaagcctatttaatgaaatattagatgaaaaatttccaagtctaccaagagatttagacatctagataaagaaggctcaaaaatacccaaataaatacaatgcaaaaaggtcttctccagggcacattatagtcaaactatcaaaagtcaaagaaaaaaatttaaaaatagcaagagaaaagcatatagtcacctgtaaaggagccgctatcagactaactgtgaatttctcagcagaaactttacaagccaggagagaatgagagagagagaaaaaaaaaaaaaaacacctgccagccaaggatactgtacacagcaaaattatccttcataaatgaaagagagagaaaaatattttcagacaaaaaaaaactgaggaaattcattgcaacctgatctgctttacaggaaatgctaaagggagtttttcaaactgaaagaaaaaggtcctaatgtgtaacatgaaaacatctgaaggtataaaacccacaggtaaaagtaagtatcccgacaaattcagaattctctaacatggtaattgtagaacataaatcacttatatccttagtaggaagattaaaaaacaaaacagataaaaataattaccataacctgttaaagaataagcaatataaaaagatgtaaatgatgacatcaaaaacacaaaatttgggagtcgattttttaaaaaattttcttgcaatcaaaattaagttgttatcagttcaaactaacttgttataactataaggtattctgtgtaagcctcatggtaattacaaagcaaaaatttttataatagatacactaaaaataaaaagcaagggattaaaacatactgatagaagaatcacttaaccacaagggaagagattaagagaggaagaaaggaacaaaggatctacacaacaactagaaaacaagtaaaaatatggcactaccaagttcttacctatcaaaaattaccttgaatacaaatgggttaaattctccaactaaaagacatagagtgtttggttttttgttcttgcgatagtttactgagaatgatgatttccaatttcctccatgtccctacaaaggacatgaactcatcattttttatggctgcatagtattccatggtgtatatgtgccacattttcttaatccagtctatcattgttggacatttggaccgcatattctcactcataggtgggaattgaacaatgagatcacatggacacaggaaggggaatatcacactctgggaactgttgtggggtggggggaagggggagggatagcattaggagatatacctaatgctagatgacgagttagtgggtgcagtgcaccagcatggcacatgtatacatatgtaactaacctgcacaatgtgcacatgtaccctaaaacttaaagtataataaaaataaaaataaaaaaatttaaaaaaagacatagggtggctgaatgaatttttttttaaaaaaagatctaactacatactgcctaagagaaagactttacctgtaaggacacacatagactgaaagcgaagggatagaaacagatattccatgcacatgtaaacaaaaagaaagcaggaatagctatacttatatctgataaaatagacttcaagtcaaaaactataaaaagagacaaacagccagacgtggtggctcatgcctgtaatttcagcactttgggaggctgaggcgggtggatcacctgaagtcagaagttcgagaccagcctggccaaatggcgaaactccatctctactaaaaatacaaaaattaaccaagcatggtggcaggcgcctgtagtcccagctactcgggaggctgaggcaggagaatggcatgaacccgggaggcggagcttgcagtgagccgacattgcaccgctgcactccagcctgggcacacagcgagaatctgtcaaaaaaaaattgacaaacaaggccattatataatagtaaagaagttaatacaacaggagaatgtaacaagcataaatatatatacacccaacattggagcacctaaatatattaatgtttgatctttgtattttctagtctcattaaaagtaagggcaaaaactacaattacttttgcaccaacctaatataaagcaaacattaatagaccaagggggaaatgaagacagcaatgaaataatagtagaaaactttaacaccccactttcaccaatggacagatcatccagacaaaatatcaacaaagaaacactggacttgaactgcactgtagaccaaatagagcaaacagacatttacggaacattccatccaacagctacacagttcacattcttctcaactgcacatggaacattctccaggagattatacattaggccacaaagcaagtcttaactaacttttttaaaatgaagtatttttttcctgccaataatggaataaaactataaatcaacaacaggaggaacaactgtacaaatacatggaaattaaagaacatgcccctaaacaaacaatgggtcaatgaagaaattaaaggagaagttaaaaaatttcttgaaacaaatgaaaatggaaacataacatgccaaaacttatgggatacagcaaaagtagtccttaaagaaaagtttatagcaataaatgcctacatcaaaaaaaaatctcaaataaacaacctaatgatgcatctcatggaactagaaaaacaagaacaaacaaaaccccaaattattagaagaaatgaatgaatacagatgagagcacaaataatcaaaatagaaactaaaaaatacaaaagatcagtataatgagttagttagttctttgaaaagataaaaaaaagtcaataaacttttagccagactaagtgataataaagaagaaaaacagaaataaatcagacatgaaaaaggagacattacaactgataacacagaaatacaaagaattataagaaactactatgaacaactataagccaacaaattgaaaagcctagaagaaatggataaattcctggacacatacaacctaccaaggttgaatcaagaaaaaatggaaattttgaacaaatcaacaatgagcaacaagattgaagcaaaaatacaaagtctcccatcaaagaaaagttcagtacccaatggcttcactgctgaattctaccaaacatctaaagaactaataccaattcttcacaaactattcaaaaaattgaaaaggaagaaactcttccaaaattattttaggaggataatgatcattatcctgatcccaaaaccagacaaaagcacaataacaacaaacaactacaggccaatatcctcaacaaaatactagaaatagaattcaacagcacattaaaagatcatttaccatgatcaggtgggatttatcccagtgatgtaaggatggtttaacatatgcaaattaagaatgaaggacaaaaattatattatcattttaatagacacagtaaaggcatttgacaaaattcaatatcccttcatgataaaaactctcaacaaagtatagaaggagcatacctatatgataaacctacaaacaagatgaaactgagtggggaaaagttgaaagcttttcctttaagaactggaataagacaagcatatccaccctcaccacttctattcaacacagtactggaagtcctagccagagcaattaggcaagacatccaaattggaaagaaggaagtcaaattgtccctgtttggccaggctcaatggcttatgcctgtaatcccagaactttgggaggccaaggcgggcagatcacttgatgtccagagttcgagaccagcctggcaatatggtgaaaccccatctctactaaaaatacacacacacacacacacacacacacatgctagccagacatggtggtgcgctcctgtagtcccagctactcgagaggctgaagcaggagaatcactagaaccccagaggcggagcttgtggtgagccaagatcgcaccactgcactgcagcctgggcaacagagtgaaacactgtctcgaaacaaaaacaaaaacaaacaaaacaaattgtccctgtttgcagaagacatgatcttatatatagaaaactgccaaaactacaccaaaaaactgttagagctagtaaatgaatgtagtaaacttgtagtctacaaaatcaacatacaataattgatagcatgtctatatgccaacagtgaacaatctgaaaaagcaatcaagaaagcaatcacgtttacaatagctacaaaaaatgtccagaaataaattaaccaaggaagtgaaagatctctataatgaaaactataaaatattgatgaaagaaattgaataagacacaaataaatggaaagatatttcatgttcatggattgaagaattaatattattaaagccaaagcaatctacagattcaatgcaattcctatcaaaattccaatgtcattcttcacagaaatagaaaaacaatcctaagatttgtgtggaaccacaaaaaatcccaaagagccaaagaagtcttgagcaaaaagaataaacctggaggcatcacactacctgatttcaaattatactacaaagttatagtaaccaaaacagcattgtgttgacataaaaacagacatatagaccaatagaacaaaatagagagcccagaaatacacccaaacatttaaagccaactgattttctacgaagttggcaagaatacatgatgggtaaagaacagtcttttcaataaatggtgctgggaaaactggatatccatatgcaaaagaatgaacctagaccccctatctctcaccacgtatgaaagtcaaataggccaggcacagtggctcatgcctgtaatcccagcactttgggaggccaaggcaggcagatcacttggggtcaggagtttgagaccggcctggccaacatggtgaaaccccgtctttactaaaaatacaaaattagccaggtgtggtggcacacctgtagtcccagcaacttgggaggctgaggcaggagaatcacttgaaccccagaggtggaggctgcagtgagcctagatcgtgctattgcactccagcctgggcaacagagtgagactctgtctcaaaaaaaaaaaaaaaaaaaaaaaaaagaaagacagaaagaaaagaaaagaacaatagattaaggaattaaatttaagacctgaaactctgaaattattagaagaaaacatagtgtaagcatttcatgacatcaatttgggcaagaatttgttagacaagacctcaaaatcatgagtaacaaaagcaaaaataaagaaattggattacatcaaactagaaagcttctgcacagcaaaggaaacaatcaacagagtgaagagacaacctatagaatgggagaaaatatttgcagattatacatctgacaagggattgatatctagaatatataaggaactcaaacaactcaatagcaaaagtccaaataatcctattaaaaatgaacaaaagacctgaatagacatttctccaaaagagacctacaaatggccaacaggtatatgaaaaatgctcaacatcactaaccatcaggaaaattaaaatcaaaactacaatgagatatcacttacccctgttagaatgactattataaaaaagacaaaataacaagtgctagcaaggatgtggagacaaagaaacccttatacactgttggtgggaatataaattagttaagccattagagataatggtatagagatgcctcaaaaattaaaaatagatctatcatattttctagcaatcccactactgggtatataccaaaaagaaatgaaatcagcatgttgaagaaacatctgcatccccatgtttatgacagcattattcacaatagtcaagatataaaatcaacttaaatgcccatcaatggatgaatggataaagaaactgtgatatagatacacaatggaatactattcatccatttaaaaaagatgaaatcctgtcattttcaacaacgtggatgagcctggaggacattatgttaagtgaaataagccaggcagagaaagacaaatactccatgatctcagtcctatgtacaatctttaaaatttgatctcatagtagttgagattagtgattctaggaagataagggggaagtgggagatggggagagattggtcaatgggtacaatgttacaggtagatagaaggaataagttctggtactctattgcacagtagggtgacaatagccaacaataatatattgtatatttcaaatagaagagaggattttgaatggtctcacaacaaagaaatgacaaacatttaaggtgatggatatgataattaccctgatttgaataattacacaatgtatacatgtattgaaacatcacattgtacccataaatttgtagaattatttatgtgtcaataaaaagtaatacagttaaaaaaataaaattgcccattaggataaataaaaagacccacacacaaaattatcattgtggcatttcagagcacagagagaagatacttaaagcttcttctgagaggaacaggacgcatacaaaagaatgggaattagactggcgatataattaagcaatattgtaaaagatctaagggaaaaattatttggaacctagaatttttagtcaaactatgaatcaattttgggggaagaaaaaagacattttcatatatagagggccttaatagtcactgaatgtgtactatagtaaaaccagaaactacataaaagaggaatttgggagattcagcaacccaagagaataatgaagtatgagggggatgttttctccttagttcttttccgtatttttcaataatttgataataaacatgcataattttataattaaaaaggaaattaattttgacaacatgcaagttcctgttctcacataccttatagtggagggacagattgtagtcaaataagcataataatacatgcaaaattacaaactgagcattactctgaaggaaaattacataattctatgtaagcctataatacaggaatctgacctagactggggaatcagagaaggcttccctaagcaagtaccccttgaacttagctttgaaactgggaaaatgaggcaatgtgagatgaagctgttagaggtattaggaatcaaacctattggggccttctagtccttagtagagagtctggactttattctatgtggaatgacagcctccagtgggttttaggctggcggatactacaatcagatctggaatgcagaaatagtacaccagtttctttgtgggtaaaagtcttagaggggagaatatgaccaactgtagggagacctgtaaaaaaagtttatcagtagctcagacgagataatggtaacttggattaagatagtggtagtagtaacagtgaaaaactagatacatttgaaagcttttagagccaaaataggaggcagctgtgcccttgttgttaccagtgtgggatctgaacacatgactacttgggttcaaatactgagcaaattaattaacctctctgggcatccgtttcctctcctgcaagacatggatgataatggtttctacattcatagggttgttatgaggaatgaatgaattaaaacttgtaaaatactttggacagtgcttgacataaaacaagtgctcaatacatattagctattattgattatattgccctggtcagtgtcaaactgcatatgggagatgagaatggtaacaaggataactctcacttgcatattcaaatgcaggatgctgccattcactgttataaaaaactctggaagagaatgaagtgatgaaaattgtaaatttggttttgaacatgtgggttttttgagatatctaggtggagatgttgagaaagtgattggctgtatgagcctggagttccagaagaggtcagcaggggagacagaagaaggagcagtctgagaagtaggagaaaaaaacccacagagatgttggcacagaggccaagggaagagagagttttaaaaacgaatgaatggtcaacaggtgcaaataaagactgaaaaatgtccattggatttagcagcatgatggtgattggtgaccttggcaagagctgttggtttgatagtagcccaatgttcttgataaatttgtttacaagtcaaggtagcaataaagtgtctaaagtcaatttgtccattctgtcctagcaagtgttttccatttcagattctctacttcatagccataggtgtcttattcctactttacaggtctgattggatgccacaggaaatcagtctattggcatgtgattggaatgggcaccactcctgaagtgcactcaatattcctcgaaggtcacacatttcttgtgaggaaccatcgccaggcgtccttggaaatctcgccaataactttccttactgctcaaacactcttgatggaccttggacagtttctactgttttgtcatatctcttcccaccaacatggtaatatcttggatctttaaaatgaatattataaatatccagtcctacttttaataaaatttactggacaatgtacaggaatatagtgtgttgctgaaggggacattatagagttactgtattagacctcagccaagatcccctagtttccagcttccagtgtaaagtttttaccttgactataaaagggcttgagtattagtaggactcatggatttttagttaaatgtctgtgatggagaaaagatggcttatggatgattgaggtgggaaaatgaggagaatagtatgcccttggtttctcagccttatcccattaattacgctccaatattatggagagaggaactgcaagttgtagctgaagagattttttttttttttggagaaatctagggaaatgggaaaaaaaggcattgtccagattgcaactgtaagggctccactatatcattagtaatgcccagagcagtaaatagcaaatatgacaggctattgtagagcttgacttcagacaccagacagccagaggcactctgtagatacctggcagtagatgagagacacctgtgaaactgagggcaggtcaggagctagtgaattttagaagtaacatgggattgaaaggactatttggtgggaactttggaaagggtcaaaggttctgtgtaagcaaattaggacgatggtaactacagttttaaattattgttaatgtaactttatttgtaactgctagttgtgcaaattcagattgcatcatcatttcaccccaattttccttacttttgtatttattctgctaactcttaatcttggatcaacctaataaccctctttctctacccctctcgtggccattgaaggctcttagtcagtttgtgctgcaataacagtataccacagaatgggtaatttataatggacagaaatttattggctcacatttctgggggctgggaggtccaatatcaagttgcctttttctgcgtcttaacatggtggaaggcattatatgacaaaagggcaaagaaagggtgagagagagcaagaggagggtgagctcactcctgtgataacaaatccactcccatgaacactttccccagataactgcattagtccattcatgagggtggaacgcttatgacctaaacaccttttatatgttcacctctcaataccatcacgatgataattaaatttcaatatgagtttcggaggggacagacattcaaaccatagcaagagttattggagaaaaatgtcggagaggcctaatcttttatatttaatagcatttctttcttcctattactctcatattaaccttctcctcaggttccttggttgacttagaaaagagaattgatcttgccatgcatccaccattttcctccttatgttctattagtgaccttgtttattgtcttctgtagtgattaagaatagaaatctctcttccccatgtgtcacataatatttatggaattttgacaagaccttagtggacaaaatgtgtcatactgaatgagtaacaggaagttgatgcacaaacaacattcttgcaggcacagaggaataggtcatttacttgtatatgatcattgtcaatcaatcattgtccagttggaccccgattcagtttattttttgttttgtttttctccttttcacagattctatccactaattttaatctttatttttcagaaaaaaatgctttatcttattgaacctcagaccaaacactttgtttttcgatgcagactgagttatgtttaaggctacatgaaccccagactagttgtttgctgctcctaaaaccttccctgttcctcataatcaagtaaacaggtctcccttcttagaagtatttgatcttcaaaattgccctgtggtataaatagggcaggaattattattatccattttacaaagcatgaagatgagactgagaatgttgaatacatttgccatagggtttacaactagtcacaggcagacatgctcttaaaatatatatctccttgattttaagttgtatcttgtcatggttttatgaacttggaacatgtcttaaagtttatatctacactaacatttttcccaataagctgttattaaatcaatgatttgtggcaagaagggatagtgatgtggaaagggggggtacttaggggagagcctggaaggcctaataagagagaaagaagtcataaaagttaaggcaagtgatatggtttggatatttatcttcactgaaatctcatgttgaattgtaatttccaatgctggaggtggggtctggtggcagatgtttggatcatgggggtgaatccctcatggcttgatgctgtcttcatgatatttggtcattcagaagtgtgtggcaacttgcactctctgtcttgctcctgctttcaccatgtgacatgtctcctcccccttcacctacccccatgattgtaagcttcctgagacctccctgaagccaagcagatgccagcaccatgcttcccatatagcctgcagaaacatgagccaattcaatctcttttctttataaattacctagtctctggtatagaacagcctaatatagcaagacactctgacattgtttggtttgtctgactccagatggcatggaagcttatgtcaaagtagacagctgtccagaggaaccccaactacgaatgaaaaataatgaagaagcggaagactatgatgatgatcttactgattctgaaatggatgtggtcaggtttgatgatgacaactctccttcctttatccaaattcgctcagttgccaagaagcatcctaaaacttgggtacattacattgctgctgaagaggaggactgggactatgctcccttagtcctcgcccccgatgacaggtaagcactttttgactattggtactctctcttccccatactcaaaaagttcttaccagttattcaaaccaacaaatcctgaagccatgtttaaggttaggtacaggtatggaatcaaatggcaagggtattaacatttggaaactaacatagctgagcatcagagaagcttgtatttttctcactccttgccttgattgaatcatataagctgttttagagttggatttgagcctacctagaatttttcttcccaacctctcatctttttttctcttatacagaagttataaaagtcaatatttgaacaatggccctcagcggattggtaggaagtacaaaaaagtccgatttatggcatacacagatgaaacctttaagactcgtgaagctattcagcatgaatcaggaatcttgggacctttactttatggggaagttggagacacactgttggtaagttgaagaaaagatttaaggtcaggtaagaagaaaaagtctggagagttttgagtttctaaaatacctcataattcagccttgtctccaatggacatgatcttttaaaagctataaatgttacacaaataatagctgattgtatgtatttaaagtttgagtatatagaataaaaatttaatgtcacccactaaactcgacactcctttgaaatactgcttagactttgatacatatccttccagatctttctccattaattatgtcatataggagtcagcagactatggcctgtgaaccaaatttggcttgtggcctgcttttgaacagtccatgagcttagatgagattttacatttttaaaatattgcaaagaaaagaaaggaggatgggaggaaggggaggagaaggcggaggagcaagagaatatgtgacagaggctagatagggctcacaaattttagagtacttactatccagccttttccaaaaaatgcttgcttgctcctgatctaggatattaagaatgagtatggtgtaagtaacagaatactcaatggacagtggtttaaataaataagggtttattttcttcacaagaaatttgaagattggtcgttggttccataaattcagccgctgaagaatgtcatgaagaacactggtttttagatatggagttttgttagatactgccaaactgactttcagcaattttgtaccaatttatatcccctaccataagtatatgactgcccttttccccacaccattgccaacaacatatattataaaccttcagaaaattttccaatttgatgagcaaaatgtttatatgttgtcttcatttgcatttccctggttagtggtcaaattgtatattgtttcatgtttgttggctatttgtataactccctctgtgaattgcctgcttgtaaattttgtccagttttctatttggtcagtcatcttttgcttatgtatttgtaaaaggtctttatagattatggatattgacacattgttatttatctttcaaatgttttcctcacattgtcacttgtactttaactcctttatgatattttttgtccttcaaagatttttcatctttatatagtcaaaacctcctatcttttatcaatcttttcatttatatgtctctggatctttttcacttatgttttctgcctgagaatgtctttgccacccccaagacactacaaaaatagtctatattttattctcttacttgtatagctttatttttacagtgagcaatctaattgccctggaagttacttttgaatgtagtgcataattcaaatagaaattttcccaaatggcagctgacacaaccaatccttttttcattaatttgaaaatgtcttctttatcatatactaaattgctaaaatctgggatttttaattctccttaactaatctgttaccaccctgttttaatgacttcaactttgtgatatgtttgatatctgtatgacatcttctttcattgtacttcttcaaaatttttattagctattattgtacaatttttcttcataaattttgtgtacgtattttttctatttttcattttttgaagattgtataattttattttttattcattaatttttaaaatgcataatgacacaataattttacatatttatagggtactttttgtgtattttgagttacttttactggctaatttaaaaatagataaacaagagcatgcaataaaatgtaaattttcctccctcttggacttccaaccccatagtctgacagacagtcattgctgtgggtttgtatactcccctccagaagtagtgcatacatgtacaaatgtgtgtgtgtatgtgtgtgtgtgtgtgcatttcacacaaaaacaagagcagtgtaaattggtctgtaccttgatttttaaaaggtaacaatatattttgaattagccaggcatggtggcacatgcctgtagtcccagctactctggaggctgaggcaggagaatcgctcgaatctgggaggcggaggttgcagtgagctgagatcgcaccactgcactccaccctgggcaacagagtgagactctgtctcaaaaaaaaaaaaagtaacaatatattttggatatcatttcatgtcaacatatatagatctaccccattctttgatttattcaggttatactctggataccatgctgaatcctacacttaaacattacctcaaaatggatcaaagataaaatgtaagagctaaaactacaaaattataagaaaacaacaggataaatctttgtgatcttgaattagacaatagtttattggataggacaccaaaaccaacaagcaacaaaagaaaaaccatttgacccagccatcccattactaggtatatacccaaaggaatataaatcatgctgctataaagacacatgcacacgtatgtttattgcggcactactcacaatagcaaagacttggaaccaacccaaatatccaacaatgatagactgattaagaaaatgtggcacatatacaccatggaatactatgcagccataaaaaatgtccccgtttgcagatgacatgattgtatatctagaaaacaccattgtctcagcccaaaatctccttaagctgataagcaacttcagcaaagtctcaggatacaaaatcaatgtgcaaaaatcacaaacattcttatacaccaataacagacagagagccaaatcatgagtgaactcccattcacaattgcttcaaagagaataaaatacctaggaatccaacttacaagggatatgaaggacctcttcaaggagacctacaaaccactgctcaacgaaataaaagaggacacaaacaaatggaagaacattccatgctcatggataggaagaatgactgggttttaagacaagagcagaagtggaagttgcatttttatcctcatatcacacacctcagatctggaggtgggattgatattttcagggttcttcgctgcagcttccatgttattgctcttccattctctctctctctctctctctctctctcgtctctgtctctctctctctctcttgagatagggtctcattctgtcacccaggctggagtgctgtggtgtgatcacagctcactactgcagcctcaacttcctgggctgaagtgatcctcccacctcagcctcccaagtagctggtactataggcatgcaccaccacgcctagctaatttttttattttttgtagagatgaggtctcactgtgttacccaggctggtcttgaagtcctgggctcaaacgatcctcctgcctcagcctcccaaagtgctggcatgagccactgcacctaggcctttgttttcttttaaagctggtgcaatcaggcaataccacctgctacccttgcttaatactgtaatcaactgtcctcttggtcatgcctgctcatgcactgaagattttatctcctgaaacactgtctctttctctattatcagtgaatttaatgcccaaatagtaataaaggctgagaggaagcagtgtcctcaccaggcatctaaatttcaattagtgtgagaaggtgcagagaatacttcctgaagcaattgaaacaatttttaaagaagtggaaaggggcctttagagagaaacctaagtactgtcagccctctacattgtcaactgaagaatcctaagtttgtaaatttggagtggaaagggttgcaggctgggaagtgtagcctctggcagcaaatggaagcaagcactttgaagaaggaaggatgagataagaatttatgctgaatgagttggctaagtatacatatttaacaggttccaggaggagctgtgaatatttatgatggggcacctgcaaccacacatgttacatacattccatgttcactttggggtggagacttaacatttagatgcatgaaaattaggctgtatatgtcaaaagatgaaacagaggacacagaggcagcctctgtaaactggccagagccagtccatggtcagtggtctctcatcaggaagcaatgcttctcggttgttatgataaaactgcacaaagggaggggaatccaccacgtctttagaaaggactggtttatgtttaacccttaagaaagaaagtctaacggcagattagggagggagggaatgtaacaaggcatgcccgatctcccatcccatcatggtcagaaactcagtttttaagccatctctggggtctccttggccgagaaaggggtctcttcagtcgtttggggatgcttaagattttatttttatttttcagtatcactggatttctagtctcatattcaaacaaccattgattgaaagtattcaaaaaacaaccccaaaacaataaaagataataatacaacaataaacaataatacaaagaaacaatacggtaaaacaactatttacatagcatttatgttatattatgtactgtaagaaatctagagacgagttaaagtacatgagaggatgtgcatatgttatatgcaaatactacatcattttgagtaagagacttgagcatcacagattgtggtatctgcaggggtcctggaaccaatcctccatgcatgccaaggaacaatttcatgaaaagaccaaatattttgagttttatctagcctcaaattactataatgtagatagaggccacttttatttatctggagttagaccacagttttcttgttgatcctagtcgttttaggatttgatcttagatctcgcttatactttcagattatatttaagaatcaagcaagcagaccatataacatctaccctcacggaatcactgatgtccgtcctttgtattcaaggagattaccaaaaggtaaatattccctcgatttatagctcttttttacctgtagatacagatgagataaatatcatcaataacaactaaaattatgttggtcctttctccagctgttggccggacctcaagctccagtctaaagttataaaaatcaattataggaatcctcaggtgatgtttcatgtaaattcgtgaagagtcgcctgacatgtttttcctattacctagcggtgatgttcaaatattccacagccaattagattccactgcaattggttccactgcaactactgtaaatgccctaaaatcttgaagctggttcttctggcacttaagataatttttttttctgagtacggttttcagctacattccacacttttggtatctagtgtggtattccacactttgggtaactagtttgatattttcaggattctttgctgcagcttccatgttattgctcttccttgctctctctctctctctctctcaacagggtttcactctcacttttggtatctagtttgatattttcagggttcttcgcatattcatttctaaatagttcacaactccagtttttatttactatattgtttgctgtttaaagatttattttttcttttagtagattggatgttatgtatattctttctattatttaattttggatgaatatttatcaaaataatagatgtgtatgcttaaaactacaaaagggctgcctccctagaggcatccatttttaagaatttctgtttttgatttttggtggttatctctacatctctaaaaagttacttatactgctaactctttgtttttcaactttagacattatatacttactttgttttgtgcttttttccattcaagttgtttcagttttatcagtgttttcagttggattggctatcattagaactttaaaaatatactaaacatcaacttttagtaagatattttccaatcatggattgaaaatatcttttgactccatacttcataaattaaggatattaaaaactgtacccctcacttttcctttccccaaacctttcttttctctactgctgctagccattcctttacttttacaaaactaaacttgataacatttacattttgtgctgtaatttgaaataactcttccttgctttgtctatatattttctctaaagcttaaaaaattaaaaaacagcatttgtattattttagtattttagcaagtttcttttcataaatgttaactgcagaactgggtaatatgctatgattgctctcttttctacagctcaagtgattttactattaagataaaataatatgtggaaggaaaaaagttgatctcatagaagtagagataaaatagtggttactagaggctaaagaggggaaggggagggggaaatagggagacgttggttaatggatgcaaaattccagctagataggaggcataagtcctaatgttctatagcactgtagggtgactgtagtcaacaatgacatctattttcaaatagctagatgagaggatttggaatgttcccaacacaaaggtgtatcctgaagtaagactttgttttcttttattcggaaaagaaatgtaggcttcttcaaccctatttcttaggcctttcagcttcttaatcattctatgtattgcttgctatccaaatcttttattttttttttgagacagcgtctcgctctgtcacccaggctggagtacagtggcacgatcttggctcactgcaacctctgcctcccaggctcaggctatcctcccacttcagcctcctgagtagttgggaccacagacgcacactaccatgcccagctaattttttttattatttttattttttgtagaaatggggtgttaacttgttgcccagactggtgtcgaactcctgagctcaagcgatctgcctgcctcagcctcccaaagtgctggaaccaaatctttttcttcttaaagacattcttgtagtgaatagcattaactacttttcccttgtacatttctattttttgatttcttcttttgtttttctggaagtatattctcaagtaacttctaaatatgtggtacatagagggtgaactttctgaatccttcagtatcacatgatgggcagacagactggttataaaaattttcccgctgggtgcggtggctcacgcctgtaatcccagcactttgggaggccgaggcgggcagatcacttgaggtcaggagttcaagaccagcttggccaacatggtgaaaacccatctctactaaaaatacaaaaaaaatagccgggcattgtggcgtgtgcctgtaatcccagctactcaggaggctgaggcaggagaattgcttgaaactgggaggtgaaggttgcagtgagccaagatcaccccactgcactccagcctgggcaacagagcaagactgcatctcaaaaaaaattccttcccctgttttctaatattcattattgccgataagaattctttatttgcatttctttatggaagaatggcatagtgacagagttctggggagattttgaatgtgtgtcccgaaatttggaggcatacgtggatagttactggtaacctgcttttccatggagaattttgaaggctgtaatgcccataatagtgggcaagaagagagggcaagagtggagcagtttaccttcctgctgtttgacatgagtttattctgtaacaagtgaatactgttgaaagtagctgggctttatcccttttgaagatattctacccaagaaggcagttaggcaggctgaggggatagcagaaccaatagagtcttggatatatcactggaagtaagaagagctgatggggagaggagagttgcagaaggatagctgaaagaaacatctctcatgtcatggaactatgtaatgctgaggtccccatggtaactctaaagaaaccatacatgtgtcctatgaaaagaccagcatttgggcacctcccacacagagaacattgatgaccaaatagtgttgtcaaagatagagcagcaggacctgttaaacaagagtctgtttgccctttcttctattacctaccctccctcacccccagctcctggaaaagggaagagaaggctcagaaatattgaaagaacatactacaccattccctttctttctttctttcttttttttttttttttggagacagagtctcgctctatcccccaggctggagtgcattggcatgatatcggctcaacctctgcctcccaggttcaagcaattctcatgcctcagcctcccaagtagctgggattacaagtgcctgccaccacacctggctaatttttgtatttttagtagagatggcgtttcaccatgttgaccaggctggtctcgaactcctcacctcaacaccattccctttctatggatcctctaaccataggtcaggcataacttactgaggtgaggaagagcttagaatgaatataaaattaaaattttgatttagattgtatcttcaggtatgaaacatacccagaatgagacttaattactaaaatcagttcttgtcctgaggacccattaccctgagggcagatctcagttcttgctccctttcctcacagaagtcagagactacaccttaaaactccaatgccaagctctttggcatatattcaggcctgacactttcacagtcaaccggataatcaattacagctttttactttttaaaaaaattgtttgaatcttaaaattataataggtgcgactttagcttccacttgctcagaaacttcatatgtacatacagatttgtagaacccttgcaacaacaacatgattatcaatatgtggcttgttgtactctaattgagctatttatggttttgcttgtgggtaggtgtaaaacatttgaaggattttccaattctgccaggagaaatattcaaatataaatggacagtgactgtagaagatgggccaactaaatcagatcctcggtgcctgacccgctattactctagtttcgttaatatggagagagatctagcttcaggactcattggccctctcctcatctgctacaaagaatctgtagatcaaagaggaaaccaggtgagttcttgcctttccaagtgctgggtttcattctcagtgtatgtccccttataacctgaagaaaatataatggtttgcaatataggtcagtaaaagaaatgagcttagcttttactaaatttgagtttcacgtagtaaacgtgcctgctggatggataggccatagaatgtaggccctagatttttcctatagtactcattcccagtctgggatttagctctctctagctgatcctccccatttttatatgtccaattaccacctattttcagatgacccacagatttatatctacagcctagatttcttccatggacatctcattatgggtgactcaaaagtacctcaaaattaacatgtctgcagcatgtagcactgttgcaggaagtcagggaccccgaacagagggactggctgaagccacggcagaagaacataaattgtgaagatttcgtggacatttattagttccccaaattaatacttttataatttcttacgcctgtctttactgcgatctctgaacataaattgtgaagatttcatggacatttatcacttccccaaccaatactcttataatttcctatgcctgtctttactttaatctcttaatcctgtcatcttcataagctgaggatgtatgttgcctcaagaccctgtgatgattgcgttatctgcacaaattgtttgtaaagcttgtgtgtttgaacaatatgaaatctgggcaccttgaaaagaacaggataacagcgatttccagggaacaagggagataaccataaagtctgactgcctgcagggccaggcagaacagagtcatatttctcttcttgcaaaagcgaataggagaaatatcactgaattctttttctcagcaaggaacagccctgggaaaagaatgcattcccagggggaggcctctaaaatggccgctctgggagtgtttatcttatgcagttgaagataagggataaaatatgccctggtctcctgcagtgcccccaggcttgctaggattaggaaattccagcctggtgaattctagtcagaccagttctctgctcttgaaccctgtttcctgttaagatgtttatcaatgacaatgcatgcacagcaggacatggaacctcattagtaattctaatttcgccctaccttgtgatcttgctctgtccctatttgccttgtgatattttattgcctttgaatcatgtgatctttgtgacccacaccctattcgtacactccctcccctttgaaaatcactaataaaaacttgctggttttgcggcttgggggcatcacagaacctgccgacatgtgatgtcacccctggagacccagctgtaaaatttctctcttttgtactctttctctttatttcccagaccggccgacacttaggtaaaatagaaaagaacctatgttgaaatattgggggctagttcccacaatatagcacagtgcatctcacttagtaagagcttaataggctacgtgcggtggctcacgcctgtaatctcagcactttgggaggccgagacaggaggattgcttgagctcaggatttcaagaccatcctgggcaaaatagtaagaccttgtctacaaaaaaaaaaaaaaaaaaaaaaaattagctgggcatggtggtgtgtgcctgtagtcccacctactcaggaggctgaggtgggaagatagcttgagcccaggaggtcgaggctgcagtgagcctggatgacaaagcgacaccctgtctcaaaaaaaaaaaaaaaaaaaaaaaaaaaagcttaataaatacttttgggcaaaacatagggaaagatataaaatatttcaaaatatggctagaatttggaccatttctactgctttaaaaaataaagctaaattctctgaacaagaaaagcttagttcttcacaaaaactcattgctcggccccagaataactcagtgccatattgctgaggcttgactacatgtccatttgattatatttatgatacataagatccctactagtctgaaaacatttcatatgtttagagagtaaagtatatgaactttggtgccaataaaacacatggcacataaactcagagaagtataaattttgccaagtacttgtcctgaccgatttttcctaactatagttttttcgtcacttttgggaagagaactgaaatattattctatattctccaatctcctctcttcagtattttggtttatatagctataggttataaaaaatgaggtttatacatattagtgaggtttacatatgaaatcttagcagatccaattagcaagcgactaattcataaatctggttcatatacaaaatgctcttctgaaaaaaatttgaatgttttaaacagaaaatttaaggtattagtgttgtttgacatttttgtggttcaccttatctttcttatttgatttctgtttttctatttttaattttttatagccttgtggaaggtcagttgctagatggaagtttaggaaagtcagtatctcatttgacttaactaacttaagaaaggcactgaataaccacttggttctttaaggagttaaatcttctaatctgaacatgaagagaataaggctacagactgtaccaaataaatcagctagcatatggccttgggtgcagaaaaaactaagttcagtgggatcagtcaccctcttgtcctggggacacatttgttgtaagcatatactcactgctcatagcacccaccctcaactcccaagccctggtacatgcctaagaggaaatggaattaaaccaatggattagatatatcacatgcatgccatcgctttcatcatagactgctagctcctacctgacaacatcagtagcatttctttacccctttcaatatatgtaattaacagataatgtcagacaagaggaatgtcatcctgttttctgtatttgatgagaaccgaagctggtacctcacagagaatatacaacgctttctccccaatccagctggagtgcagcttgaggatccagagttccaagcctccaacatcatgcacagtgagtaaagcagcacttaagtccagtgggtggtgaataaagaaaaattgatgtaatcaaagtgatgtccagataatgaatgaattgtatgtgcacataaatttaacaattatgttacctataaatgtataatttttactcaaacacacgtgatcatataacccatattttaaaaatccagtcaccattttttcctttcaatatttacttgatttccctctcccttttaattccctatctccttctatattacatcttttcaccaaccattccatgcccaggtaacatattttaagacatattttctctataattatataatcatatataaacacatacatacattgtattagtcttctagtgctgccataacaaagtactgcagactgggtggcttaaccagcagatatctattgtcttacaactctggaggcttgagatcaggatgtgggcaacgttggtttcttctgaggcttctctccttgtcttgtagatggctttctcccttgtcttcacatggtttctcctttatatatctttgtcctaatctcctcttctaataaagataccagtattgttgggctagggcccaccgtaatgaccttattttaactaactacctatttaaaaacactatctccaggtatagtcacatgctgaggtactggggtttaggactgcaaggtataaatttgggatgggggaacacaattcagcccattgcatacatacacatgtgtatatatttatatataccacaaatctgaatggtcaaaaatatggtaaaaaattccaattgcactatcctacagggaaatgcgaaatagaataacaataggatagcactttatacccatcaaactgccaaaattataattactagtgggcttgtggataaaagagtgttctcatgctatattagtggataagtagtatagtcttttcaaaaccaatatatgccttttgaaattctgattattaagatgtttaagatggagtgagccacatttccctgtgtgtcccactggatgcaactaaaaatcctgaacaggccgggcacagtggctcacgcctgtaatcccagcactttgggaggccgaggcaggcggatcacgaggtcaggagatcgagaccatcctggctaacatagtgaaaccccgtctctactaaaaatacaaaaaattagccgggcatggtggcggccgcctgtagtcccagctactcaggaggctgaggcaggagaatggcgtgaacccggaaggcggagactgcagtgagccaagatcgtgccactgcactccaggccggcgacagagtgagactccgtttcaaaaaaaaaaaaaaaaaatcctgaacgaaatgcatgggaaccttgaaaagttataatgtgagttatactcacctaccagaatgtggcatatgttacaattctatgcccctcctctcaaagctttagccctttaactttgggttgagcctcatatttagcttgaatttctagtaatagtgatatattattctccagagttaaagtcctttactatccattattctaaaaattttaaggttgtttagtcctttgagttgcatttttattttttacatagttcagggtattgctttccttctgaaggattcagatttcacatttgtgcaagagtctaatgcttagtatttaattctagtggcacagagctttttcttttctccctcttctctccagcctcatggctttggtttagaattccttcagcctgatagaatattgtattttataatttccttattgtgctatttactagatatttgttcttctatttttttctattcataatttctccctttcccaccacatctttttccaagtaggatgtgcacttgccacagtatctggacagttaaactgtctcattttcttggagacggtgatgaaaactagagagatatagtgacataagcagagccagaaaacaatttcactgaagatgatatatattttttttcctctgggatttctaatatagcttttggtggagataagagtctggaattgagaaagaagagattggaattgagaaaaagagtctgagaaagcacagggagagacacaaaggcagagaccaagagacacaggggaaggatcttcagaggaagagtccagggagaaagatgctaagacagagggataagaaaagaagaaaaaaaaggaccaggaggagagagacccaaaccataaatcactcctatttccattagcagtaaaattgataatctattttcatacaatgaaataccatgtgacaatgaagattcacaaaaataaagctatacacaacaatatgaataagtatcacaaagacaatttttagtaaaatggtaagtgtcaaaagaatatatacagtattatattatttacataaagttcaaaaatgggcaaaattaacttatatagtttagggatacagaggaagaaaagtataaaggttagtaaggacatgattataataaaagacaagatagtggctacctcttagaaagagttcatttgagaataaacacatgtgttttgtggggatagcagcaatattgtatttcatgacctagatgtttgttttataattttgtgttttaaaaaattgtaggatttatgatttatttcgtagatggatcctacaaatgatagggaaattgcagtaggaatgaagaggaaggaacatgtacaggatttgtttagaagatagaaggcacatgattttgtaaataattagctatgtttggtaaaggactaagaggattcaaagatgattaccaaatttctgatatgggtaactagaagaagagtgagacaaaatggaagaaagtgtatttaaagaaatgatagcaaaaactttccaaatctggagaaagatgtaaatatccacgtacaagaagctcaaagatctctagtcagattagattcaaacaagactatatgaagacacgttacaatcaaactgtcaaatatcaaagacaaagagagaatcctgaaagcaacaacaaaaaagaagcaaaccacatacaaggaaattccaataaggcagaaactttacaggtcagaagagggtgggatgatatattccgagtactgggaaaactttacctagaaaatgtttccttcagaaatgcagagagataaagactttgccacacaattccagttagacaagagaaataaattaaagacatctattgtacactatggtgactacagttaataaattacccattccaatatatacatatataaacattgtgatgtacatcataatatattctatttttccctgtcaattaaaaaataaatttaaaaagattggatagagaagaatcagccattctagtaattaagcctgaggaagcttacattccagtgatttcagataaccattatgcaagttaaggaataaactggataggatgatattaaaaaaacaaaaccaccaatgagatacaccagaatggctaaaattaaaaaggctgtccataccaagtattggtaaagatgtagagtaatgagaactctcataaatttctggtcaggaaatccaaacatcgaaagccaaacatcggcataccctattgactcaggaaatccactcctagtatacacctgttatgtcctgaatcatgtcccctagaattaatatgctgaagccctaacactagtatttcagaatgtgactgtatttggagatagggtctttaaggggtttattaagttaaaatgaggttgttacaatgggccctaatccaatatgactagtgtccttataagaagaggaaatgtgggccaggcacagtggctcacgcctgtaatcccagcattttgggaggccaaggcgggcggatcacgaggtcaagagatcgagaccatcctggccaacatggtgaaaccccatctctactgaaaatacaaaaattagctggacatggtggcgagctcctgtagtcccagctactcgggagactgaggcagaagattgcttgaacccaggaggtggaggttgcagtgagcagagatcacgccactgcactccagactggcagacagaccgagactccatttgaaaaaaaaaaagaagaggaaatgtgtacacacagagacaccagggatgcatattcacagaggaaagaccaagccaaggagaggtgtcagtaaaaaccaaacctgccaataccttgatcttggaattttagtgttcaaaactgtgagaaaacacattcctgttatttacacctcccagtctgtggtatattgttatggcaaccctagccactagtacagcacccaaaagtagtgtgtacatatttcacaaaagacatgtaactatttaatccatgtggagtgtcaaaaggcaaaaatacaacaaatgtattttaaagattgtaattggcttttatacatgattctagaatcagatagccctcagaaccaaatacagaacagcagccagcaacatagtatggatagaaattggaagtgaggtttagagacagcttaattgattacagttgggcatttttgccttatttgaagctgttagtcgcctgcaattgatggaagttcagctgctataatcggctgagactgagctgtttgttataaaagcatattcctaaattaggctttcagttagttcatcaactaagccaggctgcaactttgttgtgcaaggactcaagtgcaaaggtacccttaggcaaaattcagattaatttaaaaggactttacttttgttagttatgtgaaatgaagtggaatctattttttccaagtggatagtcatattttctattatcatttaccaactagctgatttttttcctgtactggttggagatgctgcctttattatatattaagtttcaacttattatatattaagtttccgcttacatcttgtcagtttctggactccatattttgtttgatatatttatctattctgcattaagactgcatttttaattataatagctttataatatctcaatgttgtataggaaaaaaacttcaattattaattagttatactaagccaatgtctaagtattgcttagtggtttgtgggcaaccatcttacacagtacctagtaacagagtagacaagtgtttattgaatggatggatgaatggatgtgtggaagaggctttcagaaacaattcccttcatagactaaggccaatgttacttttgcttagctctttagtttgaaataatttaaaatgtacagaaaagttacaagaataatacatggaacttgcacacaccctttacccagattcacaaatgtttaacattttgcaattttgtttttcattttcttttctttatatacacacttctgttacttattttctatttgaaaattagttgcagacatcacatccctttacctctcaatactttagtacacatttcctgtgaataaagatatcttttacataacagacacttcaaattgataaagcacatttccataatttacaactggtattccagttgtatcaaccaatgctgtcatttatagcattttcttctttgaagtacagggatctagtacaagtaactacttgtcctgcttctttcatttccttgaatctggaccttcatcagatggtaactttaagcacccaaaggtttttttctggtttctcctctgtgtagtttaagaccatgcaaacatcttgctactcatcaaaatgccccccatataacatccaaattaatctttatcatgatggtttatgactgtctcctcacattgggattggggcccaactgattattaacaatctacttttttggaagatataatatctcttcctgggaataagataatgggcataacatataataattcctaattgtatcatgacaatcacaatccaaaatactaaatctgtgatgtgtctaaatctcttttccccattgtttttgcaggcatcaatggctatgtttttgatagtttgcagttgtcagtttgtttgcatgaggtggcatactggtacattctaagcattggagcacagactgacttcctttctgtcttcttctctggatataccttcaaacacaaaatggtctatgaagacacactcaccctattcccattctcaggagaaactgtcttcatgtcgatggaaaacccaggttagttattatatttttcttgtaccaacagctgtgaatgcttcactagccattcgtatgctcttttgcccactagctcacatgctgtcatttatagcattttcttccttgaggtacagggatctagtttctcctctgagtagttattattttcacccttgcaactaataaacagtttgaaggatcacgtagtagttctatttttagttttttgaggaacctccttactcttttccacagtatttgtacttatttacactcccaccaacagtgtacaagcattccccttttgccacatcctcaccagcattttttaattattttgtctttttgataaaagccatttaactggagtgaaatatctcattgtgcttttggtttgcatttctctggtaattagtgatgttgagcagtttttcatatacttgttggccatttgtatgtcttctttttttttttttttttttttttttcagacggagtctcgctctgtagcccaggctggagtgcggtggcacgatctcggctcactgcaagctccgccacccgggttcacgccattctcctgcctcagcctcccgagtagctgggactacaggtgcccgccaccacacccagctaattttttgtatttttagtagagacagggtttcaccgtgttagccaggatggtctcgatttcctgacctcgtgatccacccgcctcggcctcccaaagtgctgggattacaggcgtgagccaccgtgcccagcctgaatgtcttcttttgagaaatgtctattcagatctttgtccatttttaatagggttctttgttttttttgctattgactagagtttcttatatattctggttattaatgccctctcagttgtatagtttgcaaatatttcatcccatcctataaattgtctcttcactttgttaattgtttcctttgctgtccagaagctttatggcttgatataatcccatttgtctacttttgctttagtcccctgtgcttttgaggtcttacctgcaaaatctttcccagaccaatgtcctggcgcattcccccaatgttttcttccagtagtttcatactttcaggttgtatattttagtctctaatccattttgatttgatttttgtatatagtgagagataggggtatagtttcattcttctgcatgtggatatccagttttcccacaccatttattgaagagactattctttcaccagtgcgtgttcttggcactttgtcaaaggtgagttggctataaatgtgtggatttatttctgggttttctgtcgtgttccactggcatatatttctggttttatgccagtaccgtgctgtttttgttactacagctttgtagtatagtttcaagtcaagtagtgtcatgcctccagctttgttcattttgctccagattatttagctgtttggagtcttttgtggttccacacaaattttaagattcttttttctatttctgtgaaaaacttcactggcatttggataggtattacattaaatctggtagcattgatattttaacaatattagtttttccagcccattaaaatgggatagataccttttcagttttttgtgtgttcttcaattccctttatcagtattttagttttcattatagagatatctcagctctttggtttaatttattccaatatatttatttttattatagctattgtaaatgatttttaaaaaatttctttttaggttgttagctcttggtatatagaaatgctactgatttttgcatgttggttttgtatcctgcaactttactgaatttgtttatcagttctaatagttttttgatggagtctttagttttttgtgaaatataagattatgtcatctataaacaaggagaatttgacttcttcctttccaatttgggtaccctttatttctttctcttgcttacttgttctggcttggacttccaggactacattttatagaattggtgaaagtgggcatccttatcttgtttcagatcttaaaggaaaggcttttggttttccacatttggtatgatattagccgtagtttgtcatatatggcatttattgttttgaggtaagctttctatacccagtttgtttagagttttctcatgaagggatgttgaatttaatctttttggcatcaattgaaatgatcatttgtttttgtccttcattctgttgatatgatgtatcacattgattcatttccatatgttgaaccatccttgcatccctgggatgaatcccccttgatcatgatgaatgatcttttactgtgttgttgaatttggtttgctagtagttcgttgaggatttttgcatcaatgttcatcagagatattggcctgtagtttctttttgtgtatgtgtgtgtctttgtctggtttggtttcagggtaatactggccttgtggaatcagtttggaagtatttttcccccttgatttttgggatagtttgtgaagagctggtattagttctttttttttattattatacattaagttttagggtacatgtgcacaatgtgcaggttagttacatatgtatacatgtgccatgctggtgtgctgtacccattaactcgtcatttagcattaggtatatcgcctaatgctatccctctccccttcccccaccccacaacagtccccagagtgtgatgttccccttcctgtgtccatgtgttctcattgttcaattcccacctatgagtgagaatatgcagtgtttggttttttgttcttgcgatcgtttactgagaatgatgatttccaatttcatccatgtccctacaaaggacatgaactcatcatttttatggcggcatagtattccatggtgtatatgtgccacattttcttactccagtctatcattgttggacatttgggttggttccaagtctttgctattgtgaatactgccgctataaacatacgtgtgcatgtgtctctatagcagcatgatttatagtcctttgggtatatacccagtaatgggatggctgggtcaaatggtatttctagttctagatccctgaggaatcgccacactgacttccacaatggttgaactagtttacagtcccaccaacattgtaaaagtgttcctatttctccacatcctctccagcacctgttgtttcctgactttttaatgatcgccattctaactggtgtgagatggtatctcactgtggttttgatttgcatttctctgatggccagtgatggtgagcattttttcatgtgttttttggctgcataaatgtcttcttttgtgaagtgtctgttcatgtccttcgcccactttttgatggggttgtttgtttttttcttgtaaatttgtttgagttcattgtagattctggatattagccctttgtcagatgagtaggttgcgaaaattttctcccattttgtaggttgcctgttcactctgatggtagtttcttttgctgtgcagaagctctttagtttaattagttcccatttgtcaattttggcttttgttgccattgcttttggtgttttagacatgaagtccttgcacatgcctatgtcctgaatggtattgcctaggttttcttctagggtttttatggttttaggtctaacgtttaagtctttaatccatcttgaattaattttagtataaggtgtaaggaagggttccagtttcagctttctacatatggctagccagttttcccagcaccatttattaaatagggaatcctttccccactgcttatttttctcaggcttgtcaaagatcaggtagttgtagatgcgtggcgttatttctgagggctctgttctgttccattggtctatatctctgttttggtaccagtaccatgctgttttggttactgtagccttgtagcatagtttgaagtcagggagcgtgatgcctccagctttgttcattaggcttaggattgacttggcgatgcgggctcttttttggtttcatatgaactttaaagtagttttttccaattctgtgaagaaagtcattggtagcttgatggggatggcattgaatctataaattacattgggcagtatggccattttcatgatattgattcttcctacccatgagcatggaatagtcttccatttgtttgtatcctcttttatttccttgagcagtggtttgtagttctccttgaagaggtccttcacatccgttgtaagttgtattcctaggtattttattctctttgaagcaattgtgaatgggagttcgcttatgatttggctctctgtttgcctgttattggtgtataagaatgcttgtgatttttgtacattgattttgtatcctgaggctttgctgaagttgcttatcagcttaaggagattttgggctgagacaatggggttttctagatatacaatcctgacatctgcaaacagggacaatttgacttcctcttttcctaattgaatacactttatttccttctcctgcctaattgccctggccagaacttccaacactatgttgaataggaaaggtgagagaaggcatccctgtcttgtgccagttttcaaagggaatgcttccagtttttgcccattcagtatgatattggctgtgggtttgccatagatagctcttattattttgagatacgtcccatcaataccaaatttattgagagtttttagcatgaagggttgttgaattttgtcaaaggccttttctgcatctattgagataatcatgtggtttttgtctttggttctgtttatatgctggattacatttattgatttgcatatattgaaccagccttgcatcccagggatgaagcccacttgatcatggtggataagctttttgatgtgctgctggattcggtttgccagtattttattgaggatttttgcatcaatgttcatcaaggatattggtctaaaattctcttttttggttttgtctctgcccggctttggtatcaggatgatgctggcctcataaaatgagttcaggaggattccctctttttctattgattggaatagtttcagaaggaatggtaccaattcctccttctacctctggtagaatttggctgtgaatccatctggtcctggactcttttcggttggtaagctattgattattgccacaatttcagagcctgttattggtctattcagagattcaacttcttcctggtttagtcttgggagggtgtatgtgtcgaggaatttatccatttcttctagattttctagtttatttgcgtagaggtgtttgtagtattctctgatggtagtttgtatttctgtgggattggtggtgatatcccctttatcattttttattgcatctatttgattcttctctcttttcttctttattagtcttgctagcggtctatcaattctgttgatcctttcaaaaaaccagctcctggattcattaattttttgaagggttttttgtgtctctatttccttcagttctgctctgattttagttatttcttgccttctgctagcttttgaatgtgtttgctcttgcttttctagttcttttaattgtgatgttagggtgtcaattttggatctttcctgctttctcttgtgggcatttagtgctataaatttccatctacacactgctttgaatgtgtcccagagattctggtatgttgtgtctttgttctcattggtttcaaagaacatctttatttctgccttcatttcgttatgtacccagtagtcattcaggagcaggttgttcagtttccatgtagttgagcggttttgagtgagtttcttaatcctgagttctagtttgattgcactgtggtctgagagacagtttgttataatttctgttgttttacatttgctgaggagagctttacttccaactatgtggtcaattttggaataggtgtggtgtggtgctgaaaaaaatgtatattctgttgatttggggtggagagttctgtggatgtctattaggtccgcttggtgcagagctgagttcaattcctgagtatccttgttaactttctgtctcgttgatctgtctaatgttgacagtggggtgttaaagtctcccattattattgtgtgggagtctaagtctctttgtaggtcactcaggacttgctttatgaaactgggtgctcctgtattgggtgcatatatatttaggatagttagctcttcttgttgaattgatccctttaccattatgtaatggccttctttgtctcttttgatctttgttggtttaaagtctgttctatcagagactaggattgcaacccctgcctttttttgttttccacttgcttggtagatcttcctccatccttttattttgaggctatgtgtgtttctgcacgtgagatgggtttcctgaatacagcacactgatgggtcttgactctttatccaatttgccagtctgtgtcttttaattggagcatttagtccatttacatttaaagttaatattgttatgtgtgaatttgatcttgtcattttgatgttagctggttattttgctcgttagttgattcagtttcttcctagcattgatggtctttacaatttggcatgattttgcagtggctggtactggttgctcctttccatgtttagtgcttccttcagaagctctcttaggtcaggcctggtggtgacaaaatctctcagcatttgcttgtctgtaaaggattttatttctccttcacttatgaagcttagtttggctggatatgaaattctgggttgaaaattcttttctttaagaatgttgaatgttggcccccactctcttctggcttgtagagtttctgccgaaagatcagctgttagtctgatgggcttccctttgtgggtaacccgacctttctgtctggctgtccttaacattttttccttcatttcaactttggtgaatctgacaattatatgtcttggagttgctcttctcaaggagtatctttgtggcattctctgtatttcctgaatttgaatgttggcctgccttgctagatttggcaagttctcttggataataccctgcagagtgttttccaacttggttccattctccccatcactttcaggtacaccaatcagttgtagatttggtcttttcacatagtcccgtatttcttggaggcttcgtttgtttctttttattcttttttctctaaacttatcttcacacttcattttattcatttcatcttccattgctgataccctttcttccagttgatcgcattggttactgaggcttgtgcattcatcacatagttctcgtgccgtggttttcagctccatcaggtcctttaaccacttctctgcattggttattctagttgtccattcgtctaattttttttcaaagtttataacttctttgccattggttcgaacttcttcctttagctcggagtagtttgatcttctgaagccttcctctctcaactcatcaaagtcattctccatccagctttgttccattgctggtgaggagctgcattcctttggaggaggggaggtgctctgattcttagagtttttggtttttctgctctgttttttccccatctttgtggttttatctacctttggtctttgatgatggtgacgtacagatgggttttcggtgtggatgtcctttctgtttgttagttttccttctaacagtcaggaccctcagctgcaggtctgttggagtttgctggaggtccactccagaccctgtttgcctgggtatcagcagcagaggctgcagaacagcagatattggtgaactgcaaatgctgctgcctgatcattcctctggaagttttgtctcagaggagtagctggccatgtgaggtgtcagtctgcccctactggggggtgcctcccagttaggctactcaggattcagggacccacttgaggaggcagtctgcccgttctcagatctcaagctgcgtgctgggagaaccactactctcttcaaagctgtcagacagggacatttaagtctgcagaggttattgctgtcttttgtttgtctgtgccctgcccgcagaggtggagcctacagaggcaggcaggcctccttgagctgtggggggctccacccagttcgagcttcccggccgctttgtttacctactcaagcctgagcaatggcgggcacccatcccccagccttgctgccaccttgcagtttgatctcagactgctgtgctagcaatgagcaaggctccatgggcgtaggaccctctgagccaggtgcaggatataatctcctggtgtgccgtttgttaagcccgttggaagagcgcagtattagggtgggagtgacccgattttccaggtgccatctgtcacccctttctttgactaggaaagggaattccctgaccccttgtgcttcctgggtgaggcgatgcctcgccctgcttcggctcacgcacagtgcactgcacccactgtcctgcacccactgtccggcactccccagtaagatgaacccggtacctcagttggaaatgcagaaatcacccgtcttctgcatcacttatgctgggagctgtagactggagctgttcctattcggccatcttggctcccaatgcaaagaccttcaaacaacgtgacttcattttctcactcctaccttttgtgctcttgtcatttatttgaattctacatatattttaaaccccataagacattattattgttttatataatcaatatcatttatatatatatatatatttacacctttcatttctttcattcttttctgcatttcttgcttccatctatgatcattttctttttgtctgaagaaacttctttggaacttccttcagtgtgtgttggctagtaaaaagttctctgtcagtttttggtcagaatgggtctttattttgcctagatacaagtccttggttggatttacatattgtgaatgttttctcccagtctgtggtttgtcttttcactcctttaagggtgcattatggttaatagaagttcttacatttaattaattcttatttttcagttttttatggttaatgccttttgtattctgtttcagaaatttttgcctatcctaagaacatgatgccatccttctatattttctttctacatattttaaatattttcttctagaagtctgattgctgtgttgttcacaattaagtttatgattcatttttaattaattttgatggagtgatgcagataaaagttcatttttccatatggatatttaattgctctagcaccaattgttggaaaaaaataatttcctcactgaattgcactgttgtctttgccatgaatctgatgactgtatcactgtagctttgtttctgtactctatttcaggggtaggttatgatccacaagccaaatttgcagcttgtttttatatggcattgagctaagaatttttttacatttttaaagaattgtcacacaaaacaaaaaaaaagcaaaaaaacaaataaggatatgtatcatggaccatatgtgtctacaaacctaaaatatttactatgttgctttttacagaaaaagtttgccaacccctgatctcttatattccattgacttattggtctatctttgtaccagtaacatactatcttatagtaagttttaatatttgttagtataattcctccaactttgctctctttgatttttatataaattttagaatcatcttgtcaattttatcaataaaaatatcttctgaggttttgatagggattacattgattctgcagatcaatttgggggagcatacctcttgacaatattgagtattcctgtccatgagcatggtttagttatttatttacatcttttaaattttctcttggcaatgtttttgtaaaattttagtgtacaggtcttgcacatttttgtaaagtgtattctttggtatttaatgctattataatattttttatggtatcagtttttgtcaattgtgtttttctagaaatatgtccctttcatctaagttgtttaatttacttgaagtaagttatttgtaatgttcttttatcatccttataatgtctgtactgatgtctccgttttcatacctgatattgttatttatattttatctattttaagtttatcgcctgcacccactaactcgtcatctagcattaggtatatctcccaatgatatccctcgcccctccccctagtgcacatgtaccctaaaacttaaagtataataaaaaaaaaaagtttgtcgcctttgttataggttcatcaaatttactaatcctaccataggatcaaatttttgctttgttcatcaggtcatggaattaaaaaaatttttttgttttgtttattttctatgttgaatttttatttttattttgctttgcatttcatttatttctggtcttttgttattattccaatactttctctggattcagttttctttttcttcttgacttcttgagattaaaacttggttcattgattttcaacatttcttactttttaaaagttcatacaaagcataaatttccctttatatactgctttaaccccatatcacaaattttgatgagtcatatttttattatcattgagtttaaaatattttataaattttacgttatttcttgttttattcatagttattttacagtgttttacttaatttcccaatatatggcgattttctggctctctctctgttgctgatttatttgttttactgtgatcacataacatactctatattatttcaatcatttgaaatttgttgagacttgctatatgcccagtgaataatttaatttgattaatggcccactgcatttgaaacaaatatgtctttgctgttattgggtagagtgtcatatatttgcctattatgtcaagttgctttatcatgtttttaaaatccttataaacttcctgatattttatctgtttcttacagacatggaggaaactgtgacatctctgtgattgttgagtttgttattttgatttttgtatttgttagtaagaatgtttcaaaataaatgaggcaatataaaatcaggtgcttacaactttaaggttgtattcttattaaatcaattctttcatctttgtgaaatgtcctttttgtctgaagtagtacttgttgccttaaacgtctgcattgtctaaaatttatacacctgcactatcatatttattttgcttaatgtttgtgtggtatatatttcccattcttttcttttcaacctatctctatccttatatttacagtgtgtcttttttaacattttctgtagtgcaagtctgttggttaattaattttgtcagtttttgcttctctgaaaagtctttatttctgtttttgaattatatcttcactgtgtatagaattctgggtttgtggttgttgtttttgttttattacattttgttttattggtttttccctcagcactttaaaaatgccgctccattgtttctacttgcatagtttttcacaataagtttgttgtaattcccatttgcattcaactgtacataatgtatctttttaaaaaaatctggatggcttcaagctctttactttgatttttgtgtgtgtgtgtgtgtgtgtgtgtgtgtgtgtgtgtgtgtgttactttggcattctctaggcttattcaatctgtaatttggtatcattaattttgaaaaatatttatcatctgtgtcttcaaatattgcttctaattctttctcttcttctggtattgcatttacatatattatactgttcaattttgtcacacagctcttgaatatgctgttctagtttgttttctaactatttttccttctagttgttcagttttgttgacatttattgacctatttttacttcagtaattgtttcctgggttgttgagttaattgatgaactcatagatgacatacaatttatctttttattcttgtgtcacttgtgcttttgatgtcacatctaggaaggctttgtctagcccaaggccacatttacttccatattttcttctaagagtttgatagttgtagctgttacatatatgtctatgatctagtttgaataaatttttgtgtatggtgtgaagaagaggtctaacctcttttttattttttgcatgtaaacatccagttgtcccggcaccatttgttgaaaatatgattcttttcccattaagtcatcttgacacccttgttgaaaatcaattgaccataaatgtgagagtttatttctgaactctccattctgttccattgacccatacgtcttctataaattcttatagctaattctacattagactttggtttttcagatgtggtcatctcattagattatggtgatatgtttggttacaagttttatcttctccttggcaacattttttttattactgctcttcttttattcgtttttgttgttcctttctctttttgtgagacagggtctcactctgttgcccagggtggagtaagtggtgtgatcatggctcactgcagcctcaacctcctgggctcaagcaatcctcccacctcagcctcccaagtagtgggactacaggcatgcaccatcatgccaggctaacttttttattttttgtagagacagggtcttgctttgttgcccaggctggtcttgaactccaagctcaagcaatcctccaacctcagcttcccaaagtgctgggattaccagtatgagccactgcacctggccttgttgttcctttcttccttttatcttgtagtatcttgatcctttttgcttattatttatcattgaggtgagtttgttctaaataaacttttcgcagaaagtttatgtagatatattaatatcaatgaggcattaggagtgagttttagattagcaggaattctcttatgaaaggtattgattgtatgtgtgagttttcagcctttacttctctccagcccatcaagatcaaagctgcagagttgtttacatttcagaatttctttcctcccctccccaccttgcaaaacagacttacagtgcaaaaatgacttgtcaatgtgattctttcttctggtcccatctttcctaccttttgagacttgtgttgaaaggagtccagtaaaaccaccgatgctagcttgtataccctgatcccattgttataatgaatgactgactgtttttcatatcaaagtataatacttgcaccttgatagaagaaagaaacaaggccaggcacagtggttcatgcctgtaatcccagcactttgggaggctgaagtaggaggaataattagactttgatattaaaaatggggaagatatggcggtataagatatgaggaagtatgtcttcttggacttttctgaaatctgccagccatgagcatccactctttttatcttttgatacctgttttatattaactatacttctattttgtggtttcatggcttcagatatcttccagcttaattgtactctgtctttaattatttgcagcaatttctgaaaggagcaagaagaaaggccagccctttcttcactaccttaaaaactggtcatcttttgaaaccccatgaaaggcacagtgggtgaccatctacatcaggagtgggcaaactatggcccttgggtagtctggtctctgtccgtttttgtaaggttttattggaacccatacacacacaaactgatcatctcttgttatgtgttaagttttcttataattattcttttctatttcatccagctgaattaccatttcaccttgtgtatgccctttccagtcttaaattatagaagctatgtctttgtggttttaaattatggaagctgtgccttcttgtgttttagtatggcaagatatttgttcttacttttcctctagaatctgcagtggattactttcagaagtaggtattgcctctaagtttcctgacttctgtttccttctccctgttctgtagtatatttatagattgcatgttttctcgtccttaaacaaggtacaaatatgttctgatcaaggtttgctagccgagaggataagtggcttgctcttagcctaactctctgtctacttaatggatgtcgaattcccttctcaactcaacagctagtaactagttccaagatcggataatagcttacagaattaattagttcagtgaaagccctggtttgatcacagaggcaggagactgatctatatatttgtagtgctgactagaccccaacttggccagatagcttatacctatgtcagaagttggaggaggagattgacagctgaggtgtctccaagggaattacaattattttcattttctttgtgtctgtaattatgtctcttttcttacttcaaattttgtatatgtgaaatttcttaatttttatttggttatttattttattgactttttcatcaaacaaccaactctaagttcttggattgaaatttatgaattaattataatgttttaaatttaccattagtcacacatacaatacaaaaagatattttcattacaaaattttaacccaagccattaaaactaaactccagcttggtcaccattcctaataccaggcccctctcagaggggagggtaaataaaagtccattttggtaactagtttgacgagaatctctaattgtttccctgtttttcttataatgtctgcctttgaattatcctctttttttcaagagttccatcatataatgtattcctttttgcttacagattgacctcctagaggcatgcatccccctgctccagtctgagctggttctctctaggcctgaggctcagttatcaacttgggacttttatttaccctccctcaggataggtacctggttcttggataccaggtcttactcttgtttgagatactcctttattttggtggcaaacattccataatcacttcctgataatggtgacatttgaggtagattttctgagtctttatatgttagaatatgtttttattctcctttgccacttgattgataatttggctgcacatagaatgtaagcattcacagggcttttgggagcagcttcccttgagaagaaggtggatgcagttaagatcttccctgaaaagactgtgtgaaatgacaaggctattgaggtacccaacgggtagcttggtaaaggtgtatcttgtctcttatgtttatgcatctactttaccaccatgtaattagcctattataacttgttgcattccttcactcagctaatcttgttcatggtagaaattaatattgctagtaccatggtagaattttatattagctggatcctagacctaaatgctccttccttgtgcttacatattctgcaagtgggtgacagtggatgctaggtattgtgttatgtgatttcaatgtattatatgatggggtagatactattagcctcatttgaaaattagaaacctattgttcagaaagtttaagtgactttctcaaagtcacacagctggtaaatggtagaactgggatttgaatccaggcaatctgatggatttaagaggaacctgtgccactatgtgatatagcaataacatctagccaatataaatactttcctgaattaaatcactgtcatattcagagagttctgtgtcactattaagaccctccattattgtgtatattaattacatttccctattttaatcccaatatctattcatttttatcacagtcctttcttatggtcacaaacaggcatagtacaacagcagcaatgcaaaaaccacttttatattacatgttccagggatttaacccaatgacctgtgatataatgatactgactagtattttttcatttatctgggaatgggagagaacctctaacagaacgttttagaatctgtgttatgagtaaccagagtcttattcttcctcatctccaggtctatggattctggggtgccacaactcagactttcggaacagaggcatgaccgccttactgaaggtttctagttgtgacaagaacactggtgattattacgaggacagttatgaagatatttcagcatacttgctgagtaaaaacaatgccattgaaccaagaagcttctcccagaattcaagacaccctagcactaggcaaaagcaatttaatgccaccacaattccagaaaatgacatagagaagactgacccttggtttgcacacagaacacctatgcctaaaatacaaaatgtctcctctagtgatttgttgatgctcttgcgacagagtcctactccacatgggctatccttatctgatctccaagaagccaaatatgagactttttctgatgatccatcacctggagcaatagacagtaataacagcctgtctgaaatgacacacttcaggccacagctccatcacagtggggacatggtatttacccctgagtcaggcctccaattaagattaaatgagaaactggggacaactgcagcaacagagttgaagaaacttgatttcaaagtttctagtacatcaaataatctgatttcaacaattccatcagacaatttggcagcaggtactgataatacaagttccttaggacccccaagtatgccagttcattatgatagtcaattagataccactctatttggcaaaaagtcatctccccttactgagtctggtggacctctgagcttgagtgaagaaaataatgattcaaagttgttagaatcaggtttaatgaatagccaagaaagttcatggggaaaaaatgtatcgtcaacagagagtggtaggttatttaaagggaaaagagctcatggacctgctttgttgactaaagataatgccttattcaaagttagcatctctttgttaaagacaaacaaaacttccaataattcagcaactaatagaaagactcacattgatggcccatcattattaattgagaatagtccatcagtctggcaaaatatattagaaagtgacactgagtttaaaaaagtgacacctttgattcatgacagaatgcttatggacaaaaatgctacagctttgaggctaaatcatatgtcaaataaaactacttcatcaaaaaacatggaaatggtccaacagaaaaaagagggccccattccaccagatgcacaaaatccagatatgtcgttctttaagatgctattcttgccagaatcagcaaggtggatacaaaggactcatggaaagaactctctgaactctgggcaaggccccagtccaaagcaattagtatccttaggaccagaaaaatctgtggaaggtcagaatttcttgtctgagaaaaacaaagtggtagtaggaaagggtgaatttacaaaggacgtaggactcaaagagatggtttttccaagcagcagaaacctatttcttactaacttggataatttacatgaaaataatacacacaatcaagaaaaaaaaattcaggaagaaatagaaaagaaggaaacattaatccaagagaatgtagttttgcctcagatacatacagtgactggcactaagaatttcatgaagaaccttttcttactgagcactaggcaaaatgtagaaggttcatatgacggggcatatgctccagtacttcaagattttaggtcattaaatgattcaacaaatagaacaaagaaacacacagctcatttctcaaaaaaaggggaggaagaaaacttggaaggcttgggaaatcaaaccaagcaaattgtagagaaatatgcatgcaccacaaggatatctcctaatacaagccagcagaattttgtcacgcaacgtagtaagagagctttgaaacaattcagactcccactagaagaaacagaacttgaaaaaaggataattgtggatgacacctcaacccagtggtccaaaaacatgaaacatttgaccccgagcaccctcacacagatagactacaatgagaaggagaaaggggccattactcagtctcccttatcagattgccttacgaggagtcatagcatccctcaagcaaatagatctccattacccattgcaaaggtatcatcatttccatctattagacctatatatctgaccagggtcctattccaagacaactcttctcatcttccagcagcatcttatagaaagaaagattctggggtccaagaaagcagtcatttcttacaaggagccaaaaaaaataacctttctttagccattctaaccttggagatgactggtgatcaaagagaggttggctccctggggacaagtgccacaaattcagtcacatacaagaaagttgagaacactgttctcccgaaaccagacttgcccaaaacatctggcaaagttgaattgcttccaaaagttcacatttatcagaaggacctattccctacggaaactagcaatgggtctcctggccatctggatctcgtggaagggagccttcttcagggaacagagggagcgattaagtggaatgaagcaaacagacctggaaaagttccctttctgagagtagcaacagaaagctctgcaaagactccctccaagctattggatcctcttgcttgggataaccactatggtactcagataccaaaagaagagtggaaatcccaagagaagtcaccagaaaaaacagcttttaagaaaaaggataccattttgtccctgaacgcttgtgaaagcaatcatgcaatagcagcaataaatgagggacaaaataagcccgaaatagaagtcacctgggcaaagcaaggtaggactgaaaggctgtgctctcaaaacccaccagtcttgaaacgccatcaacgggaaataactcgtactactcttcagtcagatcaagaggaaattgactatgatgataccatatcagttgaaatgaagaaggaagattttgacatttatgatgaggatgaaaatcagagcccccgcagctttcaaaagaaaacacgacactattttattgctgcagtggagaggctctgggattatgggatgagtagctccccacatgttctaagaaacaggtatgaatgcattggttattcctttgctctgctcttgtgacatttgactttaccagatgatgacaccaacaatgagagttagaggatgaaaaatcaaggtgtcttgaaactcttactctggtgagatagagagaagagaggtttacaagagggtagaggaatcagggacaagaaggagcaatggggagcaggaagaaagtcaacctcacctatcaaccttatgagctgcaggggaaatcttagtctcatcagagaactttaagcaaggcagaaggaagaagcaagttcgtgttaaagaggttaaggacttggggaggattggttttcatgatactggggatccagagggcaaagtaggatgattttatttttaggtgagtagagggaggttgagcagtcaagtagtacagagaaatgtggaatataaacataaggagagtcagtcagtcacaaatatttatggaacacctactacatgccagacacttttgtacacattggagtgcagcacagcaggagcttatattctattggaaagagcaagagacaagttagtacaaaactaaataaggcaatctcaattgtgttgttcagaagatagaatagaataatatggtagagagaataatatgatagagtaatacggtagagtgttacattagctgtggtggtcatagaaatcatctttgaggagttgagacctaaatgatgataacaggccagctgatggagctctgagagaagatgtttccagacagagggaagagaaaatgcaaaggccctgagaatggaaaaagtttaccatgtttgaggaacaagaagggacaagcatgacttgtcactttcccaccttgctttctagctcaagtaagcccttattgctgcattgcaaccatagactatttccctagtccactgactttctcattctcctggacctctatcttagattttctgtgttttccttaaatctcgagcaccttttttccattctccaatgcccattttcactcttagctgatgctgtgcaatgaacctccacagactcccaacatcacatttactggcatttgtacccatatactctgcctgcacacttattacaataaatagagtgtctgtgctcctaaggccaacctctccagttttgtacttgattcccatctcttctcccttcataaaaaatgttgctccagcaatttctccttttctcccttacatcatcaatttatctctccactagattaatctcatcaacatcaatcatgctattatttcctcccctatctttacagaaaccgtcttaaaataattgtccctgcttgcagcctttgcatcttttcctgccattctctcctctttaacccactccaaagaagcttttatctctattatttcataagaactacattttcaaggtcattattgatctttacattactgattactagccctcatcttatttgaattctcagtagtatttgagaggtgattactccatcgttgatacaggttctcacttggtttctctaacaccacttttcttcacttttctactaaacttactgccaatctttgtcaactttgcgagtccttcttcatccccctaatctttaaaggttagagtgctccagggattagttctccaacttcttctttattctatttatactcactctgtgacgacattgtttagcctcatgattttaagtactatctatctgcagataattccagttgaatatctggagatattctcagatctctctcctgaagtcaaaatttacatatcaactccctaccttaacatgcacacaattagactcttaattcctgccccttcccaaaacctgctgattgctcagccttctccatggcaatcaaaaaccattcctggccgggcatggtggctcactcctgtaaccccagcacttggggaagctgaggcaggtggattggttgagccccagagttcaagatcagcctgggcaacatggcaaaacctcatctctattaaaaatacaaaaattagccaggcgtggtggtgcacacctgcagtcccagctactcaggaggctgaggcacgagaatcgcttgaactggggagacggaggttgcagtgagctgagatggcctcactgcactccagcctgggcaacagagtcagacttgatctcaaaaaaataaataagtaaaaccattccctatttcagttattcagtcacagatcttgaagttttccaactctttttttcttacattaacatctaatctgtaaaggatcctgtattagtccattttcacactgctaataaagacatacctgagactgggcaatttacaaaagaaagaagtttaatggactcacagttccacatggctggggaggcctcacaatcatggcagaaggcagggaggagcaagttatatctcacatggatggcacaggcaaagagagagagcttgtgcagggaaactcctctttttaaaaccatcagatcttgtgagacttattcactatcatgagaacagcaagggaaggacctactgccatgattcagttacctcctatcaggtccctcccacagaacatgggaattcaagatgagatttgggtagggacacagccaaaccatatcattccaccccatcccctcccaaatctcgtgtcctcacatttcaaaaccaatcatgccttcccaacagtcccccaaagtcataacacatttcagcattaactcaaaagtccacagtccaatgtctcatctaagacaaggcaagtcccttccacctatgagcatgtaaagtcaaaagcaagttagttacttcctagatacaatggggtataggcattgggtaaatacagccattccaaatgggagaaattggccaaaacaaagggcctacaggccccatgcaagtctgaaattctacggggcagtcaaatcttaaatctctaaagtgatctcctttgactccatgtcttgcatctgagtcatgctgatgcaagaggtgggtgcccatggtcttgggcagctccacccctgtggctttgcagggtacagcctcccttgtgtctgccttcatgggctggcattttctgtagcttttccagatgctggtgcaagtttctgatggatctaccattccggggtctggaggacggtggccctcttctcacagctccactaggtggtaccccagtagggactctgtgtgggtgccctgagcccacatttcccttctgcactgccctagcagagtttctacatgaaggcccacccccgcagcaaacttctgcctgggcatccaggcacttccattaatttctaaacaacaaagcattcaagaggcgacttgggtgctattaagggcattcagtttcataagggaagcagagcataaaagtttggaaaatttgcagcctgataatgttagagaaaagcaaatcccattttctgaggagaaattcaagcaggctgcagaaatttgcataagtaatgaggagccgaatgttaatccccaagacaatggggaaaatgtctccagggcatgtcagaggtcttcacaccagcccctcccatcaccggcccagaggcctaagaggaaaaagttgtttcatgggctgggcccaggatccccatgctgtgtgcagcctagggagtcggtgccttgtgtcccagccgctacagccatggctgaaaggggtcaatgtagagctcaggctgtggcttcatagggtacaagtcccaagccttggcagcttccacatgatgttgagcctgcgagtgcacagaagtcaagaactggggtttgggaacttccgcctagatttcagaagatgtatgaaaacacctggatgcctaggcagaagtttgctgcgggggtgggccctcatggagaacctctgctagggcagtgcagaagggaaatgtgggctcagagcacacacacagagtccctgctggggtaccacctagtggagctgtgagaagaggaccaccgtcctccaggccccagaatggtagataccctaaatcatctctttcaaattcgaagttccacaaatctctaggacaggagcaaaatgccaccagtatctttgctaaaacataacaagagttacctttgctccagttcccaacaagttcctcatctctatctgagaccacctcagcctggatttcattgtccatatcattatcagccttttggtcaaagccattcaacaagtctctagagagttccaaactttccacattttcctgtcgtcttctgagccctccaaactgttccaacctctgcctgttacccagttccaaagtcgcttccacatttttgggtatcttttcagcagcaccccactctactggtaccaacttactgtattagtctgttctcacactgctgataaagatatacctgagactgggaaatttacaaaggaaagaggttttatggacttactgttccacatggctggggaggcctcaaaatcatggcagaaggcaaggaggagcaagtcttgtcttacatggatggcagcaggcaaagaaagaaagcttgtgcaggaaaactcttttttttcttttcttctttttagacagagtcttgctctgtcacgcaggctggagtcagtggcgtgatcttggctcactgcaacctccacctcccgggttcaagtgattctcctgcctcagccttccaagtagctggtactacaggcatgtgccaccacatgagatgagattttggtagggacacagccaaaccatatcattccccctgtcccctcccaaatctcatgtcctcacatttcaaaaccaatcatgccttcccaacagtcccccaaagtcataactcatttcagcattaactcaaaagtccacagtatttttagtagagatggggtttcaccatattggccagactggtctctaactcctgaccttatgatccgcccgccttggcctcccaaagcactgggattacaggtgtgagccaccatgcccagccaaaaactcttctttttaaaaccatcagttctcatgagacttattcactatcacaagaacagcataggaaagatctgcccccatgattcaattacctcccaccaggtccctcccacaacacatgggaattcacgatgagatttgggtggggatcctcttggctatcatttcaaaaaatagtcagggttgattatggacttagtattgaataagatgaaaatgtactgaaatggaacgatgaagataattgaccagggaaagcaggttacaagccaagagaggatacagtgtcacttcagatgctataaaagtgatgtttttattttttgaatgttatttggctatattttcaaattatctgcactgcatatgcactgcttctgtaataataaaagggtattaaaataataaaatcaagtctataaatcacacacacacaccccagcctcttctctacacctcagtgactaccaaccacatctaaattatcatcatttctcatctgaattattgcaagaagccattgcaataattcagatgagagttgatacaaagccttcctgtttccaaccttaccctcatatagtcttttcccaacattgcatctaaagtaatttttcaaattgcaattctgatcactgttctctgcttcagatcctccagtggattttcatctcactcagtaaattccaaagccttcaccatggccttcaagaccctacgaaatttgaccctctgcaacctctctgccttcatctgttaccattgtctcctgttaatcctgcctcagccacactgacctccttgttcttctcaaatggactagatgtgtgcctatctctagaccattacagtttctgttctctctacttaaaattatgtccctgatactctaatgcaagttctcttacttccttcaggacgctgctcaaatttcattttatcagtgaggctttccctgaacactgtatgtaaatattgctcccaccattttttttcaatgcacttaacagtgcctgaaatattatatatttatttctttattgtctatcttctctgactataagttaagctcattaagaacacaaactttggaggtattgttcaatgttgtgtccccagaactttgaacagtgcctggcacgtggcagatgttcaaataaatgtatgttgaatgaattagaaaatgataaatgtagggagacaaaagcaggtctcccatttatatccaaactctaggactctaggaaagactgattatatggaatcgtgtcacacagcatccatgggcaagagtggaggcagagataccagttaagatgctattgcagtcatacagataaaagaagacagttatttagaccagtgtggtggtgacagaaatggaaagaaatggaaggatgttgggtataattaaagataagcatataagactggctgttaattgagtatgggaagaatgaggagagaggatgtaaagaacatttctttttgtttgtttgttttgttttgtttttgtttctttttattatactttaagttctagggtacgtgtgcacaacctgcaggtttgttacatatgtatacatgtgccatgttggtgtgctgcgcccattaactcatcatttacattaggtatatctcctaatgctatccctccctcttccccccaccccccaacaggccccggtgtgtgatgttcccctacctgtgtccaagtgttctcattgttcaattcccacctatgagtgagaacatacagtgtttggttttttgtccttgcgatagtttgctgagaatgatggtttccagcttcatccatgtccctacaaaggacatgaactcatccttttttagggctgcatagtattccatggtgtatatgtgccacattttcttaatccagtctatcattgatggacatttgggttggttccaagtctttgctattgtgaatagtgccgcaataaatatacgtgtgcatgtgtctttatagcagcatgatttatagtcctttgggtatatacccagtaatgggatggctgggtcaaatggcatttctagttctagatccctgaggaattgccacactgacttccacaatggttgaactagtttacagtcccaccaacagtgtaaaagtgttcctatttctccacatcctctccagcacgtgttgtttcctgactttttaatgatcgccattctaactggtgtgagatggtatctcactgtggttttgatttgcatttctctgatggccagtgatgatgagcatattttcatgtgtcttttggctgcataaatgtcttcttttgagaagtgtctgttcatatcctttgtataagattattagtggatttctcagaagaaatattgtagaccagaagggagtgaaaatatagatttaaaatcctgaaaggaaataaaaactagcaatgaaaaatactatatccagtaattttatctttcagaaatgaaggggtgataaagattttctcagaaagacaaaagctagatctgctttataagaaatgctagtaggagttcttcaagctgaagaaagaggatgcttattagtaatatgaaaacatatgaaaggataaaactcactagtaaaaataagtacattgtcaaatccaaaacactctagtagtgtaatggcagtgggtaaattaattatatctttagtataaaagataaaagacaaagaaagctattttaaaaactaaagctataataatgtgttaaggaatgcaaattattaaaatatgtaaactgtcacatcaaaaacataaaataggctgggcacagtggctcatggctgtaatcccaacactttgtgggggccaaggtgggaggatcacttgagcccaggcatttgagactaacttgggcaggatagtgagatctcatctctataaaaaatttaaaaattagtaaagcatggtggtgcatgcctgtagtcccagctactcaggaggtggaggtgggaggactgcttgagcctgggggggtcaaggctacagtaagcaatgatcacaccactacactccagcctgggcaacagagcaagaccctgtctcaaaaaaaataataatatgtaggaggaagggaataaaagtgtagagtttgtggatgcaataaaaattaagttgttatcagtttaaaatagcctgctaattttgtgtaagcctcatagtaaccacagagcaaaagcctatagtagatacacaaaacattttaaaaaggtccaaagcataccactacagaaagccatcaaactataaaggaagaatgcaacagaagaagaaaggatcaaaggatctaaaaaaaaaaaaagaaagaaagcaattaacaaaatgacacaagtatgaccaaagtccactgcttctttattactgatatagaatatctttcagatcttaagggactgattaattacttgggagagaaagtttgtgttgagaagatttgcttgtgttgcaatgagaaggggaagttctactcaacagaagctgtacaggcacatatgacaaaagctggtgtaagctttttacagatggtgatgctgctttggaatttgcagacttgtatgagtttaggagtagctacccagatcacaaggaaggggaggaccctaatgaggctgaggagtcgcccttaggaaaggacttagaatatgatgatgaaagcatggaactgattctgccttctgatgccagagtgggtcatcactccttgatgagatactacaaacagtgatttggcttgtcaagagctgtggtagttgctaaatattgtgaggccatgggccgagtgcttcagtaatagagagccctgggatagactggcaacacaggagcagctgttacatgaaagtgagacatgcattatatccaaaggatgaagtcaaaatggatgctgaagacagaaatgaagaacaatgccaccaagcagatgcactttagggtccaagtgagattctgagagtctgccaggattgagtgattgtctgctgcccaagtttcctccttgccctgaggaccagggaaagccagattgtatgatggacacttttgctgctacttcacttgctctaacataataataaaaatgaaaatctaaaaaatattttattgaagaatgaaggtgaaagaaatacattttcagacaagcataaacagagaaacttcaccattagcaaaagtccactaaaatattctaatgttatacttgagacaataaaaaagtgatacagaatggaaggcatgagagacaagatgggataaagagcaaacaaagttaaatatgtggataaatagagataagtatcataaaacatggtcaaatgttttatgagcgttaagatatatagaattgctttattcacagttggtttgctgtcataacacaagtatcatgaaaatcactgctaaatctaagccaaaattgggaaaggaaaaggttcatgtcactatcatcaacgttggacatgtagactcaggaaagttcaacactactggtcatctgatctataaatgtgatgtgatcaacaaaggaaccattgaaaaatttgagaaagaacctgctgagatgggaaagggctcatttgagtatgcttgggtcttggataactataaactgaacatgaatggaatatcaccattgatatctcctaaagaaacctgaggccaaaaatatcctgtgaccatcattgatgccccagcacacaggggctttattaaaaaaaaaaaaaaaaaaaaaaacatgattagagtgatatcaccaaaatggtggatagaagcaatctggcttcactctcctccagaaaaaccaaaaacaactattcagtgtctagcttatcaccaggaatatcccataactcaaaacagaggctgtgaggatctgagtggccacatagaagagaaaaactgcaagcagaagataacaaaaatgggcctgtttaactgcagcatccccttcccaagctgccaggcaccatgcagaaaagttcccccagactgacagtatgtacatcagaaaaagtgacatctagatgaagagccagctttcccaccatcttgggttcctttgcagaaaaatcattcctgcctcaatccgtgggaagcagcctgattgcctctagggtaaaaaaatcctgagggcagctagagacaaaggatggaggcggggctagcaaccccagcatgcaaaacacattggctgctcttcatctaagccaaagaagacaccaaatgagagagaatgttcagcccgtggttcctctggacacaaaatcctaaccagatgtctcacccaaccaggatatccagtttgggacctcccccaaatcgggaataggcagtaatccaagccgttgcaagagctgcagcaaatctgggcttacagcaccatctagtgccaaaaaagaggcagtaatctcagagtaaggaagctctaattcatacataacctttagacaggcatactcctgaaaaaccaaactaagccagacacaaagactggaataaataacttagcattcatacaaagacatagatatatgtgcataaaaaacaagagcaaatagggagctatgacctctccaaatggaaacagcatggagccagtgaccaaccctaatgagatggcaaattgtagctctcaaatcaataattcaaaataaaagttctgaggaaactcaaagaacacaaaaaagcaactgagaaatttatgagataaatttaacagagaaatcaaaataataatttaaaaaaccagaaatgctggagctgagaaatacaactgaacggaaaaaaaaaatgcactggaaagtctaaacagcggaactgatcaagcaaaacgaacaatcaatgagctcaaagacaggctatttgaaaatacacagtcaaaggacaaaaaataattaaaaggaatgaagaacacttgcaagatctagaggactgcctcagtagaacaaatctaagagtcatgggccttcaagagagaaagagcaatgaataaaaagctcaaagaaataacagaaaatatttccaaacctacagagagatgtaagtatccagttataggaaggctgaagatcaccaaacagattcaacccaaataagactaccccaaggcatacaataattaaactctcaaaggtcaaagacaaagaggggatcctaaaaagagcaagaaaaaagaagcaaataacatataaaggagctccagttcatccgggaatatactctggaccagatgaacctacctgacattttacagaacattttatccaactactacagaatatacattcttcttatcagcacatggaacattctccaggatagactatatattaggccagaaaacaagtctcaacatttaaaaaaataaaattatattaagtatcttttctgactacagtagaataaaactagaaatcaatgacaagaggaacgtttgaaactatacaaatacatggaaattaaacaacatgctcctgaacaaccaataagtcaatgaagaaattaagaaggaaatttattgaaacaaatgaaaatggaaacaacataccaaaatgaatgggatacaacaaaagcggtactaagagagaagtttatagctataaatgcctacatcaaaaaagaaagactcaaataaacctggtaatgatgtaactcaaggacatagaaaaacaagagcaaaccaaacccaaaattagtagaaggaaaataataataataatcatagaaataaataatattgagaaaaagaaaacaatatgaaagaccaatgaaatttttaaaatggctttttgaaagataaaatttaaaatctttagctagactaaggaaaaaaaatgagagaagacccaaataattgaaatcaaagatgaaaagagtcattaaaactgataacacaaaaatacaaagtttcactagaaactattatgatcaactatatgccaacaaactggaaaaactagaagaaatggataaatttctggacacatacaacttaccaagattgaactatgaggaaatagaaaacttgagcagaccaataactagtaatgagattgaagcagtagtaaaaagtctggcattaaataaaagtccaggacctgatgacttcactgctgaagaaaaacttacaccaattatactgaaactatttaatattgcaaaaaattgaagagaaaagaatgtttccaaactcattctacaagaccagcattatcccaatacccaaaccagacaaagacacaacaacagcaaaaagaaaactacaggccaacttcgctgatgaatatagatgcaaaaatcctcaacaaagtactagcaaactaaattcaacaacacattaaaatgagtatttgtcatgcccaagggggattcatcctaggaacacaaagatagttcaacatatggaaatcaataaatgtgatacaccacattaacagaaggaaagacaaaaaccatatatttatttcaataaatgtcaagaaagcattgaataaaattcaacatcccttcatgataaaaactctcaacaaatttggtttaaaggagcatacctcaaaacagtaaatgttatatatgacaagcccacagctaacattacaccaaatgggaaaaaattgaaagcctttcctctaagatctggaacaagacaagcatgcccactttcatcaattctattaaatgcagtcctggaagtccaagatggagcaattaagcaaagggccttcaaattagaaaaaaagaaatcaaattccccttgtttgtagacgatataatgttatatttagaaaaacctaaacactccaccaaaaaactgttagaactgatcaacaaattcagtagagttgcaagaagcaaaaccaacatacaaaaatcagtagcatttctatataccaagagctaacaatccgagagagaaatcataaaagcattttcattttcaatagctataataaaaataaatatctaggaacaaatttaaccaaagaggtgaaagatctctatactgacaactgtaaaaccctgatgaaaggaattgaagaagacacacaaaaaatgaaaaggtatctatcccatgttcatagaatggaagaattcatattgttaaaatatcaatactactagatttcatgtattacctatcaaaataccaataacatttttcacagaaatagaaaaagcagtcttaaaatttgtacagaaccacaaaagacccagatatggtttggctgtgtccccacccaaatctcatcttgaattgtagttcccataatccccacatgtcgtgggagggacccagtgggaagtgattgggtcatgggggcagttttcccccatgctgttctcgtgatagtgagtgagttctcatgaaatctgatggttttctaagtgtttggcatttcccctgctggcacttattcccactgccaccttgtgaagaagatgccttgcttcccctacgccttccaccatgattgcaagtttcctgagacctccccagcaatgcggaactgtgagtcaattatacctctttcctttatagattacccagtctccagcagttctttatagcagtatgagaacagactaatacagtaaattggtaccgaggtagggggggcactgctataaggatacctgaaaatgtggaagcaactttggaactgtgtaacaggcagaggatggaacagtttggagggctcagaagaagacaggaaaatgtggcaatgtttggaacttcctagagacctggagggctcagaagaagacaggaaaatctgggaaagtttggaacttcctagagaatcattgaatagctttcaccaaaatgctgatagtgatatggacaatgaagttcagactgaggtggtatcagatggagatgacgaacttgttaggaataggaataaaggtggctcttgctatgctttagcaaagagattggcagcattttgcccctgccctagagatctgtggaactttgaacttgagagagatgatttggggtatctggcagaagaaatttctaagcaacaaagcattccagagtgacagagcataaaagtttgaaaagtttgcagcctgatgatgcagtagaaaagacaaacccattttctggggagaaattcaacccagctacagaaatttatataattaacaaggagccaaatgttaatcaccaagataatggggaaaatgtgtccagggcatgttagagaccttcgcagcagcccctcccatcacaggcctggaggcctaggagggaaaaatgctttcgtggcctgggtccagggctcccctgcagtgttcagcctgggacttggtgccctgtgtcccagccactccagctataagaggccaaagtacagcttgggctatagcttcagagggtgcaagcccccagcctttgttctgtgggtgcacagaagacaaaaattgaggtttgggaatgtccacctagatttcagaggatgtatggaaatgcctggatgtccaggcggaggtgtgctgcagaggcagagccctcgtggagaacctctgctagggcagtgaggaaaagaaatgtggggtgggagcccccacacagtcaccactggggcactgcctagtggagctgtgagaagagggccactgtcctccagaccccagaatggtagatccactgagagcttgcaccgtgggcctggaaaagccacaggcactcaatgccagcccatgaaagcagccaggagcagggctgtaccctgcaaagctatgggggtggagcttcccaaggctgtgggagcctgccttttgtatcagggtgacctaaatgtgagacacggagtcaaaggagaacattttggaactttcaggtttaatgactgccctattggatttcagacttgcatggggcctgtagcccctttgttttggccaatttctcccatttggaatgagtgtatttacccaatgcctgtacccctattgtatctaggaaggaactaacttgcttttgattttacaggctcataaacagaagggattttccttgtctcagatgagactttggacttggacttttgggttaaggctggaatgagctaacactttgggggactgttggaaaggcatgattctgtttttaaatgtgaggacatgagatttgggaggggccatgggtggaaacatatggtttggctctgtgtccccacccaaatctcatcttgaattgtagtatattgtttgtaaaaattcctgcctatccagagattttttaaaaaaaaacaatactttcttcaattttctcttacaatttaattttttacatttaactttttaatacttcctgtagactaaaagttattttggtgcattgtgtgaaccaaagatcaaagtagttttatttttttctgaaaacatctattcattttttcaattaattgattgtttatattaaggatctaggaggatctaaaattatggaattgtgggcaagggcaatttttgccttacatttcatgtaaggcaaaataatccccatgtgtcatgggagggacccagtaggaagtgattggatcatgggggcaggttcccccatgctgttctcatgacagtgagtaagttttcatgagatctgatggttttataagcatctggcatttccccttctgtcacctctccctcctgccaccttgtgaaaaaggtgccttgcttccccttcaccttccaccatgattgtaagtttcctgaggcctctccagccatgtggaactgtaagtcaattaaacctctttcctttataaattatgcagtctcaggcagttctttataccagcaggaaaacagactaatacagaccctaaatatccaaagcagtcctgagcaaagagaacaaagctggaggcatgatgctactttatttcaaactatactacaaagctgtagtaaccaaaacagcatggtactggcataaagacagaaacatatgccagtggaacacaacagagaacccagaaatgaatccacacatttagagccaactcatttttgacaaagtgccaagaatatgcattggtgaaagaatagtctcttcaataaatgatgttgggaaaactggatatccacatgcagaagaattaaactaaacccctatctctcactgtatacaaaaattaaatcaaaatggattagagacttaaatatacaacctgaaagtatgaagctactggaagaaaacattggggaaatgctccaggacattggtctgggaaatattttatggcctgggaaatatcaaaagcacagacaactaaagcaaaagtagacaaacgggattatatcaagctataaagcttccgcacaacaaaggaatcaattaacaaagtgaagggacaacctacaggatgggatgaaatatttgcaaactatacaactgagagggtattaataaccagaatatataaggaactcaaacaagtcaatggcaaaaaagcaaaggatcctattaaaaatgaacaaagatctgaataaacatttctcaaaagaaaacatacaaatggccaacaggtatatgaaaaactgctcaacatcactaattaccagataaatgcaaaccaaaagcacaatggatatttcactccagttaaatgacttttatcaaaaagacaaaaaataatgaatgctgatgaggatgtggcaaaaggggaatgcttgtacactattggtgggagtgtgaattagtacagatactatggaaaagagtatgtatgttcctcaagaaactaaaaatagaacgaccatgtgatccagcaatcccactgctggatatatatccaaagacaggaaatcagtgtatcaaagagatagttgcacaccaacatttattacagcaccattcacaatagctaggatataaaatcaacctaagtatacatcaacagatgaatggataaagactgtgtggtatatatacacaatagactattactcagccattaaaaagaatgaaatcctgtcatttgtggcaacatcgatgagcctggatgtcactgtgttaagtgaaataagccaggcatagaaagacaaatatcacgttttcacttacatgtgagagcttaaaaagtggatctcacggagatagagagtagaatggtgcttaaaggagtttgggaatggtatgggggggtgggatggaatgaagagaggttgattaataggtgtaaaatgaaggggtggcctgcccctcgtcacccacagtgacgagaaacactgtgggtgtttctcgtcaggtgggacgagagactgagaaaagaaataagacacagagacaaagcacaggaaagaaaagtgggcccaggggaccggcgctcagcatacggaggacccgcgccggcactggtctctcagttccctcagtatttattgatcattatctctaccatctcggagagggggatgtggcagaacaatagggtaatagtggagagagggtcagcaggaaaacatgtgaacaaaggtctctgtgtcataaataagtttaaggaaatgtgctgtgccctgatgtgcacgtatacaaacatcttggtgcattaaagagcagtattgccactagcctgtctcacctccagccttaaggcggttttctcttttctcagtaaatagaacatacaatcgggttttacaccgagacactccattgcccagggacgagcaggagacagatgccttcctcttatctcaactgcaaagaggacttcctctttcactaatcctcctcagcacagaccctttacgggtgtcgggctgggggacggtcaggtctttcccttcccacgaggccatatctcaggctatcacatggggagaaaccttggacaatacctggctttccagggcagaggtccctgcggccttccgcagtgtattgtgtccctgggtacttgagattagagaatggtgatgactttttttattattattattatactttaagttctagggtacatgtgcacaacgtgcaggtttgttacacgtgtatacatgcaccatgttggtgtgctgcacccactaactcgtcatttacattaggtatatctcccaatgctatccctccccccaccccatgacaggccccggtgtgtgatgttccccctcctgtgtccaagtgttctcattgttcaattcccacctatgactaagaacatgcggtgtttggttttttgtccttgtgatagtttgctgagaatgatggtttccagattcatccatgtccctgcaaaggacatgaactcatccttttttatggctgcatagtattccatggacaagcatactgccttcaagcacttttttaacaaagcacatcctgcatagccctaaatccattaaaccttgactcaacaccgcacatgtctctgcgagcacagggttggggctagggttacagattaacagcatctcaaggcagaagaatttttcttagtacagaccaaaatggagtctcttatgtctacttctttctacatagacacagtaacagtctgatctctctttcttttccccacagtaaaattacacttaaatagaagggataagttgtagtgttcgatattacagtagggtgactatagttaacaatgatttattgtatgtttcaaaatagctagaagagaagactgggaatgttcccaacacaaataaatgacaaatggttgaagtgattgatattccaattaccatcatttgattattacacattgtattcatgtatcaaaatatcacatgtatccccaaaacatgtacaattatcgtgtatcaatttaaaaatacatcatgataggcacctctcaggttgactgtactgtcctgattattgctagtggtgttaacaaatttgaagctagtatctttaagaacgggcagacccatgagcatgcccttctggtttacacactggaagtgaaacaactaattgttggtgttaaaaaatggatttcactgaactatgccatcgccaacagagctatgtggaaatcaataaggaagtcagccctacattaagaatactggctacaaccgcaacacagtagtatttatgccaatttctggttggaatgctgacaacttgctaacatgccttggttaaagggtggagagtcacctgcagagatggcaataccagtgtagcacaccgcttgaagctctggattatatcataccaccagctcatccaactgacaaggcttgtgcctacctctccaggaagtctacaaaattggtagtattggtaatgtctttgtgggcctagtggtgactggtgccctcaaacccagcatgattggtcagctttgctccagttaacattacaactgaaataaagtcttttgaattgcaccatgaagctttaaatgaagctcttcttggggacaatgtgggcttcagtgtcaagaatgtgtctgtcaaagatgtttatcatggcaatatggcttgtgacagcgaaaatgactcgccaacggaagcagctggcttcctgaaccatccagcccaaatcagtgctggctctccacctctgttggattgtcacacagctcacattgcttgcaggtttgctgagctgaaggtggttgatttccttctggttagaagctggaagatgacccccattgtgatttttattgctatggtttctttctaatttagtcttgaggtctctcccttgagaatggtcataagccaagagagccactttctaggagagtcctgaccagggggaaagttaagtttgagtgtgtcagcttggtgagacacaatgaggaagtaaaaacaaaataaatagtggaatagaatactaacaagtacctagaaataagtctagctaaaaatttgcaaaatgtctatggaaaaaaaaactatggaaatttactgagaaactttaaagagtacctaaataactttcaagatataccacgtacatgaattggaaaacatgatatttgaaaatgtcggttattcccaaactgatttatagattcagtgcaacctgaatgaaaatcccaagacgttccttttgtagagctcaacaagctgattctaaaattaatatgaaaatgtaaaggtttatgaatagccaagtccttcttgaagaggaagaataagatgagagtaattgctgtctaatatattgagacttattttaaagctataataattaaaacaatgtagcagttggtatagggataatcaaacaggtaaatgaaatagaatagaaaatccaaaactagtctaacacatatagaaacttgatttatgacaaaggtgtcacagaagtagagtttcaataaaatgctggaaaatgttggtatctatatagataaaacattacattggattcctaactcacaccatacacaaaaatccattcacattgcattacaagtctaaaagtgaaatataaaatcataaacattttagaaagaaaatgtaaaagaatatatcaataaccacagggtagggaaagaaagagaattgacatcaagatacaaaaagccctagccaataaggtttttttttataaattccacacattaaaattacaaacttatgctcatcaaaagataacataaaaacaatgaaaagattagccacggaatggtaaatgtttgcaatacataacacaaaggacacacaaaggaaacttatataatagattttaacaggcttctctgtgtccttcttctccagcaatcaaggaatatataaaaaagcatatcaaggatatatagggtactcttttgattcaacaagaaaaaagcagattatccaagagaaaacttggcagaaaaaagcttggataggtgctccacaaaagaggacatccaaatgactgctactcataagaaaagatgctcaacctcatagaacatccaaaaatgtaaaaacacagtcaataccagatatttgtaataatttggagcaaatggaactctcatacattgctaatgaaaatggaaaatggtccagctgctttggaaaacagtgtggcaatacctaccaaagccaaacacatgcatacctagtaattccgcccaacagaaatgcacatatatgttcaccaaaagatatgcaccagaaggttatagcaggtccatatgaaagtgccaaagattataacaactcaaatgtccgtgattagggtatattcatataatactatacaacaatgggaatgaacaaactatagctacatatgataatatagatgaatctcacaaccagaatgctaagtgaaagaagaaacaaaagaatatatgtagtatgttttatttacacacttcaaaacaggcaaaactaaactatatttttaaaggatgtatacgtaactggtaaaattataaagaaaagcaaagaaatgattatcataaagatcagaatggtggttaccttcagtgggaagggagaaagtatgattgaaaagggacatccagtgagtcttgtgggttgttggcaatgttactgatctgggtgatgattgcatttatgtaccaaaggcatttgtgttttatgcactttattgtatatgttttagttcacaatttttttagttcacaattttaatagggctttaaaaagtaaaaagaaaagagatccaagggcttgaccatgggactctcttatatttggagtatgtttataaactttacattcattcaacattcgacaaatattttttgagcacctactttgtgccaagcaccgttacaggtgctgggaatacaacagggaacaaaacagacaaaaccccagctttcatggaacttacatgctaataaagcttggcaagagtatttcaaggaagatgaagtggttaactatgcaaaatgcttctcaggcacctaggaaaatgaggatgtgaggcatttctacccacttggtacataaaattattgcttttcctctgctttttttctccagggctcagagtggcagtgtccctcagttcaagaaagttgttttccaggaatttactgatggctcctttactcagcccttataccgtggagaactaaatgaacatttgggactcctggggccatatataagagcagaagttgaagataatatcatggtgagttaaggacagtggaattacaagaaaattaattttatatatttattttcttgctgactataatgtattcccacttttggaaatttttaaagtatagaaaaataattccataattatctttgtgtacgttctatttttcctatgtatttttctccttatgtattcaaattataccatgcagaattctgattcttgtttttttactaaatatcacatcataaacatttcttacgtcattaaaaacacttcctatgtatgtttttaaaatactgcataatagtctattatatgaatttatggaaccatagtttatgtaaccatttattttgaacaagcttttagacagtttcttttttcactatataaataacgctgtaatcacaacagtttttctaagataaaattccagaagtgcaatgtatttgagcatcttaagagtttttcttattaattatttggtaatgtcccttgcacatttgtctttcatggaggaagtgcttttcttattgattatgttaccttatatattagatagtaaaccactgaacattttaatgagaggtactttttcaagtttttgttttctcttaattttataaatgatggtttttgaaataaaacaggttttaatttttaggtagtaacccatcaatctttactttttgacactttcattgcttttatgtttataaaaattcctgcctatccagagattttttaaaaaacacctatactttcctcagtttttctcttacagtttaattttttacatttaactttttaatacttcctgtagactaaaagttattttggtgcattgtgtgaaccaaagatcaaagtagttttatttttttctgaaaatatctattcgttgtttcaattaattgatggtgtatattaaggatgtagaaggatctaaaattatggaattgtgggcaatttttgccttacattttattttactttccattatattctatgataaatatgtataatttttaatctggaaagtaagccttttttaaaagataatatgcattcattctagaatttgtcatgaagaaccttaacttacatatcaactcctggcgttatggtctcttataacccctgcagtaacattttcccttttactctggaatggcttttatgtgtttaggaattttctcctttgcaactttgagttcataccttaaatttagaatacaaaacctcctcaggattaggtttgagttctaacagcatccatcttctgtaccacttcttccagggtattaaaaactttgataaagaccaaaagacaggtatttcttttagggatgtaaaccctaaggaccttaagatcctagaagattattcttgcttttttttttttgtcgttattgttctacaggtaactttcagaaatcaggcctctcgtccctattccttctattctagccttatttcttatgaggaagatcagaggcaaggagcagaacctagaaaaaactttgtcaagcctaatgaaaccaaaacttacttttggaaagtgcaacatcatatggcacccactaaagatgagtttgactgcaaagcctgggcttatttctctgatgttgacctggtaagcaggtgtctattgtgctgaccactttttggtttaaaagaaatggtctttgtgtactaagaattttgatatttatcctacgtgcaataagaagctttaaataggagagttgatcattatatttgtgttttagaaatgtcattctggaatctactgaagaggatggattatatttttggaaggtgggaggcaggttggactggcataaaaattgatgagaaatccactctggttcataggtgagagagcttatactcataggattgatgtcttccctccctaggaaaaagatgtgcactcaggcctgattggaccccttctggtctgccacactaacacactgaaccctgctcatgggagacaagtgacagtacaggaatttgctctgtttttcaccatctttgatgagaccaaaagctggtacttcactgaaaatatggaaagaaactgcagggctccctgcaatatccagatggaagatcccacttttaaagagaattatcgcttccatggtaatatattccacatccaaacattatcactgtgaaatgcagattgcactttgacaaatgagacttgatccagggacttgaacattgtatttatttagagtatatctgtgggagtggaatcctcatagatgtcagtttttttggtggagtggagagaaagaaacttatataatagattttaacaggcttctctgtgtccttctccagcaatcaatggctacataatggatacactacctggcttagtaatggctcaggatcaaaggattcgatggtatctgctcagcatgggcagcaatgaaaacatccattctattcatttcagtggacatgtgttcactgtacgaaaaaaagaggagtataaaatggcactgtacaatctctatccaggtatgagcttgtttgtgctctttcttctacctactctatttgttgagtacttactttaaatggtctaggcactgggaacacaatcagtgatcaaagcagacaagctccatgctcttaagtaatactttttcaaatgctttttaaaccatttgttcaaagcaaatgaacaagataatttcagatatagaaaaattgctaaaaaggaaatagaacagaataaatggataattaatgtcacagtactttcctagggaaaaggaatttattcctttatcatttaccatctcaaatcccatagggcaccagtagtcatccaaagagtcatttgtttatgtatgtaaccagtatattgattaagcactactcataatgttgatcacaacacaattttattttggttcttcactgtccctttaaaatagatttggccaggtgcgatggctcacacttgtaatcccagcactttgggaggccaaggttggaggattgcttgaggccaggagttcaagaccagcctgggtgacaaagcaagacccccatctctacaaaaaataattagccagacatgtggtatatacctgtagtcccagctacttcacctacttgggtggctgaagtggaaggattgcttgagcccaggaggttgatgctgcagtgagctatgaaagtgccactgcactcaaacttggacaacagagcaagaccctgtctctaaaaaaaaaaaaccatccagtttaatagcgggggtaaactttccttatttcttcgtaaaaattctgataagccctgtaacttttctgctcacccttaagtaataaacaggactaaagtcactttatgtcacaaatacagttcaaatcagaaattacaatgtccatcccaagatattaatcaaaattgtaaacttgatttaacttcaatctcccctcctccaacttgagcctgcatcaggctggaagtctgcattggaaaagggagacatggttgagtcctctgtttctgtaccttgtgatgatcgtgcttccccacaacccctttatagctgctgttttgaactccaacatggataggttaaaggtaaggggataagatagttcttacctatttacagctggcaccattgttgtaaactagcttaacactgtttgtgcctggcaatacttgttgactctttctcctgcagggcactttcagggaactctttagagactcccttacgtgactgtcatgaaatccccttgacatgatttcttccacctttactctgggtggtcacttgtgactcatttctcagccctcagtgttcacctgcagcttcttgttgctggggtaactttacccttgtaggcagctctagtggactggatccagagggaactcaccctgacttatctgtttcacagagtccacatctggccaatgggaaacacaccttttgctcagaaagaccctgggaatgtaggtcaatcataatgcagtagcattctcctgtcccaaccatcaaagaattcagtcaccctgtttctcatctcctggggggaggggagtggtcagaactcaatctccacaacccccaactgtaagggtcacgtagcaagcactttgcatttgaggggtccaaaagtagtggaactaccaaatttggtaggtctactctgatatttcgcataaaccaatgtatctcatgctcattttttagtgaaaagaaataatttctgttcctgttggtttttataaggtgtttttgagacagtggaaatgttaccatccaaagctggaatttggcgggtggaatgccttattggcgagcatctacatgctgggatgagcacactttttctggtgtacagcaatagtgagtagcaatgtgggcagaggttccctacctactcagcctacttctttacagctttcttcctttctggaatggttgcttgtgtcaggaaataaatacaagtttacatcattatcaaatttaaaatgaatattgctggtagaaatcatcagagttctcagagtagggcagatatacttgaagctttgaacactttgtacctgaagctctaaataattgacaaaaaaaaaataccacctcattttcacaacttggtaaagctcgaagatctccagtagcagattttggaatttaatgttgatttagttaccagataacttagaaatactacttggaagagtttggagatttaaccctaaacaagtaagagagccactggtctatttatgtacggaccccagtttcttcagctgtaaaatgtgaatcattctagcacctgttaggattaattaaatgaactaatacagtaaaacgttgagtacagttcttggcacatttaaacactaaaaaatagcatttgttgacgttctcccattttcattgacttacatttgagaagctgaattttgtgcacttctagttactgtgttccacccgtttcatttcagagtgtcagactcccctgggaatggcttctggacacattagagattttcagattacagcttcaggacaatatggtaaatactattatttttgctccaagaacctgggctgattatatctttttttaataatctggtggagaatctcagataatgaatccatctccatgcttctattagttctattccataagtgcctctcaaatacatctcctcctctccacttcccactgtggccatcttaactcaggtcaccatcatttcttacctgggcaatgacactgcctccttaaatatcctccctaccttcagtatttcttccttgagtcaattcttttcagtgcagcaggaagctatactttcctatgagcagtaatggtaaagtttgactagggtctatagagaattctcagaaattgttttagagcactactgcccacaggctaaatgcagcacactgcctgtttttgtatggcatgtgagctatgaacagattttccatttttaaataattgtcaaaaagatgaagactatttcatgacatgtgaaattataaaattcaaatttcagcatccgtaataaagccttattttggaacacagccacgtccattaatttacatatcatctatggctacagcagcagtaacatagttgcaacagagaccatataatatgcaaagcctaaatgatttactatctggccctttacagaaaaagtttgccaacctatgttgttgtgaggtaaaaaaaaatcctcttgaaaaggaggcgtgagagttttacaccaaaatagtaacatttttcactaggtggaagggttacattttaaaatgtcttttatttgtatttttactaatttttacttttcattttctgatttttctacaatgaacatacattgcgtaataaataataggcggggcacgttggctcatgcctcccagcactttgcaaggctgaggcaagcagatcacctgaggtcaggagttcaagaccagcctggccaacatggtgaaactccgtctctactaaaaatacaaaaattagtcgggcatggtggtacgcgattgtagtcccagctacctaggagactgaggcaggagaattgcttgaactcaggaggtggaggttgcagtgagccaagatcatgccattgcactccagcctgggtgacaaagcaagactccatctcaaaaaaagaaagaaaagaagaaataatattattatttggtagtgttggtaacaaattgcagtatcagctagttagaggtgctaacaattaacaaaattataaattttagaaaataaaatggacaacaaggataagcaatatccttagatagtaattgatactggtatgccataaagcctttatgtttttctctattttcaccacagcttagattaacctttctcaagacaataattttattctcaagtgtctaggactaacccagctgaatttaatctctgtttctttacttgggcaaaggacagtgggccccaaagctggccagacttcattattccggatcaatcaatgcctggagcaccaaggagcccttttcttggatcaaggttagaaaatgtaatcaatgatgggaaatgtatcacattcaatcaattgcattacttattcctcttgcaagctcaaaggattctatgaatatgagaaaactaaagaacagaatgccttaatgatttgtacaaaagcagtcatgaacaaagagatatggggatagaattgagtatattgatatgtcctgtttctgtattttagtccttctactgggattagaacatctgaatattttctataatattgaactcgtcatctctcaagacagtatatgttattattagatgcttccaactgcccacgtgtccttaagtactccaatcccctttattttaacataaaacaaatggttcacaaatgcaaaccacatgtgtacttttacattttctgtagccacgttttcaaaaatgtgaaattcactttaataatacattttatttaactcaacatatctgaaaatactatcatttcaacatatgatcaatgaggccccttcaaagacagacagatggaaactcttgggtctcttccatgcctcacaaaagctgagggcagcttggaagtgcctgctcagcctctccacctaaacataaggctagatgccttctagaagcccaaacaggaaatggagaaaacattttggtttccatctttgcaaatagcatgtctattaatgccacagcattgttttgtagacactgccaattttgactcaatctgagctgctgttcactaatccctaagtattttttgttggtttgtgcttctgccaaacaacatgttatgttcttcaccttgtatttctatggttattttcaaccttaagtgtatccctatatagagaacatgtttatctatttggccaccctgtgtctgtctgtgctatttaattttttgtaataacattcttatttgggagggcggaattatatcttcctcactagatacaacctgataagactagtaaatagagtgtcctgtctgtgcctagccaatgaaccctgaatgatatactctgttgtttccacttactagatttggcccattgtttcagcttgccgatcttcagtgtcccaaagtatttcctagtttttccagttactgatttgatcagtaaactttctaatactgcagcaaagtcatgatcaaaatattgaagtagacaagacttccttagtatgtgcacaatacaaatcaagctgttaagtccttactacaaccttgtgaggtagatgttactatcatcttcatttcagataatgaaattgaagcatagagaggttattgtggcccaagtcacatggctaataagtgactgagccaaaattcaaattctgatagttgggctccagaaccctaactggtaatcgttgtactacactgtttccggaatgctccctttaagttgataaccatctattaactgtcactgttcacttgtggtaattaaaccagttacaaatccacctagttatgttatcatctaccactattgaatcgccttatcttcaaggtggttttgccatctgtcctactaaggtccagctagactttttatagatctcgtaactttataaaataaaccatggagatggagttgaaagggggtgctgacaaggaagggagttggagaaggcatctattctcgtgagaaggcctgaagagtgcacaacagcctggccccaagacacaagagcactgggctggcttgaggagcaccaggtgaccaagaccaggcaatgcacagggggaagtcagcaggccccatggagatacgcagctgcagtgtttgtacttttatacagtgaaactcattaccaccttgcttacttcctagtagagagatgtgtcttgtagttacactgaaacacctggctgggcacataggtgaagctgttgagtctgtaattgtcaaactgctcccaggtgccaattataatgtagaagaggcacaagaagatgaagtggataagcctggcagtttgtcaagcattcatcagttgtcaagcatttgtcagttgcagaatgtaggtaggctgccaaggctttattgtagcctggttctattgcagctttattctagcaaggctgctggaaaatacaataatcactggtccaagaaagaactcttatactctatctatatgaagaaacagtaaaagtcaattcagtagaaatcatgatttttgtgcctggtgctttcacttttttatgccacaataccaagaggttaaaatgaagtgtctttgattgggaataccatctatctgggaaaagacagggctgcaacttctgaagaccttgacactctgtcctgttaccctgcttcatttttctcctgcgcttatcactacttgatgctataaacaaataaaaacatatatgatataaggtctatttctcctactcaactgtaagttccatgagggcagggctttctttcttgtttactactctattccctgtatctaaaacagtgcttggcacatagcaagtgctaaaaaatattctttgaatgagtgtatgaatggaacttacagtcagctgaaggagacagttattaagcataagagtgatgaccagtccaattgtgtgtgtcaggcatgtgtgaaaacgtgctaaatttgacttgcttattaggacagtaactgatacttctaatgttcttgcagcccatgacctcttctttaagaagtgtccattctgtactactttcccattattcactcattcattccaaagcatttgctatacagcagtattataccagataccatattaggtgctggggctagagagaatataaaagctaacattgattgagtgtttagtatgcgccaggccctgaactcagcacattacatgtattaactctttaacccctatggcagccctttgagataaaaactaatattatcttcactttacagataagttgagacacagaaagttaggtgactcaaatgggttcactgccttaaggatctcagtctaataaggaaagcagaaaagcaaagcaaccttataatatggtgcaataatttgctataatgaagttatatacaaagtgaagtagaagcatagaagaagcagcactaaatttgtctgggtgagtcagagaaggctaaccaggaaaaatagtttctgaactaacacttgaaggaggtgtagcagttcatcactgacagtgatgttggggtgggtctggtttcaggagaggggaggaaattggctttggtctgaggctgaggtgtgggcaaagcattagcttatgtgggtccattagcttatgtgagtccacaaaaggtgtgtgtgtgtttgtgtgtatgtgtgtgtgtgtgtgtgtgtgtgtgtgtgtacgaaatgggggctcaatgatttggtagtggtttggtttgtcaagaagcaggctgggaactcaataagcatctttccattcatttctactgtgtatcccacagcttcacacacacatgcacatttcaacattggtgactgcttcacttgcacacctaaggtaatgatggacacacctgtagcaatgtagattcttcctaagctaataattagtttcaggaggtagcacatacatttaaaaataggttaaaataaagtgttattttaattggtaggtggatctgttggcaccaatgattattcacggcatcaagacccagggtgcccgtcagaagttctccagcctctacatctctcagtttatcatcatgtatagtcttgatgggaagaagtggcagacttatcgaggaaattccactggaaccttaatggtatgtaattagtcatttaaagggaatgcctgaatactttaaagaattttggcagatttcagatattggacaaacactcttagcttccacaaacttaattccaaaaaataatttttcacttatgagcaatagagttattacggacatatcagcaaaaatgtagtagtgtcaaggctcatagatgatagaaatgaagagatgctgtattgatagaaatatgtgattcaggactgtgtggattgatgattgtgagcttgcttatggatatcctaggtttgaggttatagtaggacaatcaggttgaaatgtccagcaggcagtaggtgaaagacaagtttagggggcaaaaccatggatggagatgaagattcatgacttccacataaaaggatgggtgaaactttgggaattgatgaattctctagaggtgagctcaagacccttaaaggcttaaaacctcagcgttattgtctactcttccctcatttttatgcccacaaatctggtcaatcctttatttgcaatgcctctcacatctctttcttctgtttccatttataccgctgttgccacagcccagggtcccatcacctcacacttgatctattgtattacattcctaactagtcttcccccgtttctaatctgttctccgataaaagctgcacatcattttcaggataatcatcagtcgcctgcctaaaacttttcaatgtcttcccattgtctttagaataaagttcaaagtcttcaaatgaccccaagcaagataacttttgtttgcccctttagatccattttcctgcttctctaccctgcttcttgttctgtgaggtgagcttgtatagaatacatcaacaggttaccttgtcctccagcttttggttggatttcaccaacagggagcactggcaaaagattggcatatttattcttctgactttctccttgcagaggagttcactgtatctccccacttaaggtcactgtttccctcagagtggctttttctacctgtactagctactattgctgtgtaccaagccacttcaaaacttgctgtcataacaataaccattatgttttgctcacagattctgtagatcaagactgggacacagtggggatgggtggtttctggagcctcagttaggattatttaacagctgggtgctggaatcatctggaagttccttctcttgcttttctggtggttggtactgactgtcagctaggacagaatctggggttgttgactgatgtaactttacatggattatccctgaggcctggccttccttacagcatgtttcaaggtagttggacttctttttgagggggggtaggaaggtggggggaggacagagtctcactctgttgcccaggctggagtgcactggtgtgatctcggctcactgcaacctctgcctcccgggctcaagtgattctcctgcctcagcctgctgagtagctgggactacgggctcatgccaccacacccagctaatttttgtatttttagtagagacagggttttgccatgttgaccaggctggtcttgaactcctgacctcaggtgatccgcccacctcagcctcccaaagtgctgggattacaggcacccggcctgtagttggacttcttacacgtcattttagggcctccaagtgtgagtgttacagttaacaaggtgaagactacataaccttttctgaccgagtcttctaagttatgtagcatcacttttgttgacaaaaagtgttgaactctataaaatatttgaagagatttattctgagccaaatatgagtgagtatggcccatgacacagccctcaggaggtcctgagaacatgtgcccaagatggtcagggcacagcttggttttatacattttagagaggcttgagacatcaatcaaatacatttaagaaatacactgatttggtccagaaaggcgggacaactcaacctgggggcttccgggctataggtgaatttaaacattttctggttgacaattggttgagtttgtctgaagacctgggattgatagaaagggaatgttcaggttaagataaacattgtggagaccaaagttcttttgaagtcttatagtggctccccttagagacaatagatgacaaatgttttgtattcagatcttagttaatctctttaggattgggaggggctgggagaaaaagatctagctatgttaatagagattctttacagttgcaaatttccctccacaaagaacagctttgcagggccatttcaaaatatggcaaaaaaacatgttttggggtaaaatattttgattttcttccttgtctcataatgttatgccagagtaaggttggaaagtaaatcatgacatataaggttaaataaaacccatctgatgagaatttatgatttgtagggcatgactccccagaccccttagataggaatttgggcaagataaaaaaaaatcagagtttagtcctcactttcaatacattctattggttataagcaaatcgcatatccacccagattcaaggggaagagacatagaccctaatttttaatgggagaaatgttaaataattggtggtcattttttaaagccactacaataatctatccaattctctctttcaggatgtttctctcttctgatcctttcaggtttagggattgtcaacaaacaaaaagttaaaccctgtaaaatacttgaagagatttattatgagccaaatatgagagaccaatggcctgtgacacagccctcaggagatcctgagaacatgtgctcaaggtggtctggctacaacttggttttacgcattttagggagacataagaccgaaatcaatagatggaagatgtacattcattgagtttggaaaggcaggacaactggaagcgaggcggggcttccaggtcgtaggtagattcaaagattttctgattggcaattggttgaaagagttaagttattgtgtaaagacttagaatcaatagagaggaacatcggggttaagataaggggttgtgaagaccaaggttctgtcatgcagatgaagcctccaggtagcaggcttcagagagaatagattgtaaatgtttcttatcagacttaaagagtctgttctatcagtctgaaggtctgtgttgatgttaatgctggtcagatttttctgaattccaaaagggaggcgggtataataaggcatatttgatccccactttcccatcatggcctgaacgtttttcaggttaactttggaaggccctttgccgaaaggaggggggattagaattttattttgggtttacaggatggtaatactctgttcccaccctcctaactagtatctttattaaaccttccacaaattatcctaatttccatgttttctgttccttgctggatcccttgtttcatacagtaattggtgctagaagaaaccccaggaaacagattttcaaaatgcaattctaaggttatgttgctaatatattcaagaaacacagagataacatatttgccaaggaagaaaatgagcagttagggaatccatgacatgtgttagtattatagtttctcagattatcaccagtgatactatgggatgagttgcagatggcaagtaagacactggggagattaaatgacagtggcatttagtcactgtggcaacaaacgtagcattacctgattgtagagtggtctgtcttcttacagccctagagggcatacacatggaaaaagaaatgaaatgttatgaatatatacaaaataagaacactgatgaacatacatggaaaatcaggatgcatgcatagagcttttgaggaatactccgtatcctgtggttgtaggcagatacgacttaggggctgagcataagttgcagagctgcagtgacaattaaatgcttaactccaccagatctattatgctgtggtaagagtaccggtgggaaggagtgaaactctgaggcctgagatggaggcatttaggcagacatggatgaggctgagaattgcaaacctccaaattcccctgaacctcctttgcctgaggaggcaaccactccccagtctctgaagcagtcatccctcttttgtgtaaaagcctttcagtggctataactgagataggtgcctcacaaaccagtgactattctccttagagaccctgtttggacactacgaaagccaggcgagtcacagaaaatgacagcagatcacaaatttaatcaggtggtgatgccaaaaaacaattgcaattccagatatcatatctctgttgaagcaaatttacacagccccaggcacctgatatggaagtattgacctagagaatgttttttcttcatttccatacattagtaaaatcagaatacatttgaatttaccaagtaggaacaagagtattaagtttactgcccatgcatcagggcaatgttagctctcttgttttctatcataatatagactcaagggacctcaaacatctttacatcccacaagcacaatgcctgtccattacactgatgacattatgctgacaggatctggtaaacacataacaaataagcctgtcttgctcttgactttaatgagaatgtaacctgtgtttcactgtttaatataatgttcactgttagtttcaaatactttttatgatgtttaaaaagttttctcctatccctattttatttgcaatggcaactgaattttatcaaatgcttttccagcatctttgacatggtcacatttctcttttgtgttgtcaaattatacttaacattcaatagtgtgctgacaagaaattaacaacccacaggggagcaaagtgagaagaggttaagaagtaaaggccttgatttatagcattggcagatttccctgacataaatactactcccatcatgcctggccccagggatgggaagagatgcttacttacaattggctctcacagaccagtgcaagagcactactgtgctccatttctgggaaaactttcgtcagtcatagtgtgttagttatttaaaacttagctggatccaatttgccaacatttcatttataatttctatatctatattcatgaatgaaatgggtttagctttttcagtagctctacttaccaggttttggcatgagggttatattaaacttgaaaataaagtgggaaagcttccatttttttccatgaagactattgctctagaatagcttatttaatgtaggaatccagtatttaatgagagtaaatgaaaaagccatatgagccatgtgctttatttagtgagagatactaggctatattttccaatcgttatatgattattgctattctcatttgtgttgccttgagttaatgtctgcaaatgtgcacattagagtcatatatcccttcctgtgccatacatctatatctgtatacacacatatgtcttttctccttttttcccttctgtatcaagagttggcaagtgtttgtctattctattaatttttcaaagaatcagctcagttttaaacccaaacgtggttttgaaagagctgtttctagttcatcaatctctgttcaaaactttaaaaattctattttcctttcttttggtttgtttcctacaatctggaggtgaatgcttagttcacttattcttcaatctttgtattttaacgataaggataaattacttacagttattaactactctcatgaggttcattccttgaacagtcactgagcaactactatgtcctgggttctaattcaggggtgggcaaactatagccccagaatttggcccatagcctgcttttgtacggactgtgagttaagaatagtttttacacgttgaaaggattgcaaagacaaacatacaaagaaacaaagaagactgtgcaacagagaccacctgtggtctgtaaagactaacacatttctatcccgcccttgacagaaagagtctgtgggctgctggtctcctctaacggtggtagagatgcctgcacggttaacattaatccttggcaccagaatcctcagcacctaggaaccagatcttgcctaacacgctaatttcagtcttgaccaccttcctccggcgtagcggttctcaaacgtctttgtctttgtactattcacgtataaaatattctttcataagcaacatttatccttttgggaatacctcacaatggggagaaggggaaccccaacagcctttaagggttcactgcttcgctgccaccatttccgacggtttacactgttttaagtgtgaatttggaattgttttcaagttaaaaagcaaactaatcatgtcctctgaaagtatttgcttttggcatgctagaaatcagtgttgacttttgatactgatgtgatacattacgagggaattctcaaaactgctgaaatctggcctcggcccagttatcactgctcttaagcttctgagggagatacatgaatgagcccacggcaaatggaaaacgaggagttttagtgtttcctagaattatgctcagatacccactacctgaccgtctggttatccttcccctcacctccctgacgcaaggagtttggaccagaggcctaaggaggcttctcctgaagcccaaatcccaaactggtcaccagtcatgctccgtaactcctgaacctgacaagaagccagccggccaggtctgcagcccgggttaagaggagcataccaggaaagagccaaagagcaaaggagcatgagcccttcaaccgcttttacaataatttgggctaggcgttcagggctccgtaggacccttcctggcagccaagtgagagaaagaggaatgatggtggaatgggcctctcctgtgcttcccattacttccacactgtcgaaatagaaatagaagcagaaaagaacaccctacaagtcccacccatttggaggcactcaactcacagtgacaaccctccacacctctcccctgcaaaaagacgcaaaacaaaaacacctactccaaactgtgtccttacatctcagccccgaagatcaggattgtgtgcaacttcggcccaaaggatgcatttccccagggttgaaagtttgagaaagaggctatattctgaagagttcttgttgtcaccatcaaaaggattaaaaagacgcaataaataagaaaacagcgtagttggggggcatgctccatttgagccagaaagccttggaaacttaagtgttctcaaacggaacgccatcctgctttgggggaacacggaggctgccttgcagtcacgtgatcgcacaacaccaaagggccacgcactctgatttcacctacttaactaaaagttgcagcaaaatccctattacaggccaggcgtggtggctcatgcctgtaatcccagcactttgggaggccgaggagggtggatcatttgaggtcaggagttggagaccagcttggccaacatggtgagaccccatctctattaaaaatacaaaaattagcccagcgtggtggtgcacgcctgtaatcccaggcaccctggaggttgaggtaggagaatcgcttgaacccaggaggcggaggttgcagtgagccgagatcacgccactgcgctcctgcctgggcgacagagtgagactccatctcggggggaaaaaaaaaaaaaaaaaaaaaaaaaatccctattacaaataaaagctgttgtgatccagactgcatatacctctgcgaatggaaccagaaccgtgaattccaatgcaaatcgatgcatcggcaccagacccgctgcactggatgtatctgcattgcagtcacccgagtacggagcacatcatagatgatctctgcaggttcgttgcccacataggaggcatagcgcaaatttcaaaggaacgaatacatcctggagcccaaacagctatctggttctgctgctggcctcctgacaagtaggtaagagagtcacattttatagacgacggacaccaaaaccacacatgaggagtacaagagtagctttatcatggatttagggctgtggttacaaggaagctgtaaggaataaaatgactcccatgaagacgtaccgtgcggacgagtggaaggagaaatttggccattacaaagacacaggaatatgttaagaagtgaggggcaggatgaaatcatctagggtaggtatttagagggagggcgccgtgcaaaataaaatcctcactatgaaacaaaggcggaggcaggaggctgcgttaggtggaagcagcggaggaaggagacgaaagggattgtcattttcatgtcgtggctttttagaagacagccatgtcctctactctgattctatcaaaatgtgttctcggggtgctggtaacgttcagccaacgaaataattcctatggcggcagtaggaataacaaaacgcagaagcgggaacgatgtctttttattcctccccagacgcaaacgtggatgcatgaggtttggtaacaggcaaagtcatctggttaacgtgactgatgcaaaaagtccaggcctgggcaaaaagaagtcactgggtgaatgggatggatcagactccctgtcctgagggggagatggtttcttgcagaacgaggtgaaggaggtggttctgctcagcagtcaacagtggccacatctccacctgcagcgacttgatggcttccgtgtccttttcgtgggtagccatgaccaaagactggagcagcagaaagagctcctcgggaagctggccgctgctctcctgcccgtggctgtcaaaagcctcccaggagtacttctccagggtctgggcgtgctccggcagcagcttggcgggcggtggttgcaggaggagcagcagcagcacgcgggacacctcgcagcggaccagcacgtccgagaaggcgcccagggcggcgggagagggcgccgccgagccggagttcggaggaagcagcgcggccggtagggcgggcgtcgccccgggcccgggctggggtgccggcggcgggggcggcggcagtgactgcaccgggtggctgccgtgctcccgcgccaggcgctgcatgcgcgtgaagaccgccagggcgccggtgtagtcgcgcgccagcagctggcaggaggcggcctcgccaagcgcctgcagcgcggccaggggcagctggggcagctggagctgggcggcgcgctggaagtgaccggcggcggcggccggctggcccaggtcgcgcagggcggcggccagctcgaggcagagggcggcggcggcggccggctggcccagctcgaggtgcagacgcaccgcggcgcccagggcgctggcggcggcctgcagcggctccccgtaggcggcggggcagaccaggcgctggcgcgcgtcgcgctcctgccgcaggaagaggcgggcggcctcggtgagggccagcgcctccccgggcccgtggaagagcgcctgctggcagcgcgccaccgccagctggcaccaggccgcgtagggcagacactcctgggcgcgcagctcccggcccagctgtccgaactgctcgccggcctccgccacgttcggcttccgcaggaaccgcttcttcagcttgttcgataccagccggtagcgggccaggaagtccccggcctcgggtcccgggccggcgccgccgccgcccaggcctgcagccgctgccgccatgctcgccgccccaagcacttcccgacgcgccgccgcagctggcgggcgggccggggcggggcgacgtgccctgcgtccccctcggcgggctgccgccgtgcccgcgccggctccccagcccgagcctgccccttgccctgatgaggtgcaaagagcgggatcggaggcggggcctggccgggctgtgagcggcgtatgcaaatcgagggtctcggggatgcggatccaagaccctgggaaggtacgcggggcctggcggggcaccagctgctgctagctcggctgcaatgcaagtggtctaggttgctaaaggcatcccacagcctctccatctgaacatgacccaaacgaaactcgtgaccctaattccatgtctgcgcatttctagactgttgtccccccccccccccgccccgactactcagtcctccgtcttccggtccagggccccttgccaagcaccgggtccacctctccgtccccaccccggttgccttagaagtccgtcctgtcgcaacactgcagtcatggtcttgaggcccacccgccccaacgaacaccatcatgctgaggactttcccgggcaggccctgacttgctcagaaccagcgggggtgtccccttcccacccagggccactcccctgcactgtcacccggagagactgctcctctgtgccatccctggctcccacccaaccccagacccccaccacctctccatccctccagctgtggaggtctcacaaccccccaacccatctcaccgcccccccacccccaccccaaggcaaagtgactgaagcgggcagatggcttccttgaaacattttattgacagaattaatgaaggcccaagactttggggcctgggttgtggggggagggtgtttaaggccgggggttcaggccgggggatttggggccgggtgggtggacgagtggacctgtcaggtcccaggggccgggtgtcagaagctagtcctcgccaggggccacttgagagatggtggtcgtgttgaaaagggtgctcagtagcctgtcgttgtgaaccaccatgtccagcagcaggggagtgatgttccgctctccgctgttctgggcctcgttgcccgccagctccgggaccttggccgtcaggtactcaataaccgcagcgaggtagaccggcgccgtgcgactcaggcgctgagcgtagtggccctcccgtagactgcgctccacctggctcactgaaaacgaaagctccgctcggacggtgcgagagcaggtccgcccccggccgccagcaccggaggaccctcggcgtctcctcctcctcggcatgctgggcgttgagtgtgctatctcggcttggcccagctaggcaagatggctctcaagaggacagttaccgcgtccagtactgtgtatcctagcgaccagggcccagcccctcattggctagggagccgagaccaatgggcacgcacatccggcgacgggcacgcatgtggtgacggcccctcacaagggacacacgtccgtcaggtgacctcatcactttcccattggcctcgagggagcaggcctgggcctagaagtggctggagggccgtgggggtggggtggggcggggcagggggaatcgcgctggtgaccctctctttgccagtgggaactttccctttctactggatgggaacaccgtgggaaagacaaaggggtgggcgaggggaggacgggtaccacgccttcacaatgttgcacatccatcacgaccacctagttccaaaacgttttcaacaccccgaaaagaaaccgaaacccctgtacctataagcagtcacttgccgcacgcctccttccacaccaccactaccagcccccacaccctcccacacacaccccctgcccccgcccatacacacgttcccgatagtccctggcaacccctagtccatctgctttctgtccatagaggttagcctgttctggagatttcctatagatggaattatacgaccaaatgtgaggccgtgtgtgtctggctgctttcacttagcgtaatggtttcatcagggtgcatccatgtagaggcatgaatcactacttccttcctttgaatgactgagtacgattctgttgtatgaataggaggccacattttgtttacccactcgtcagttgatggacaggttatttcccccttctggctattgtgagtggcactgccatgaccatctctctacaggtttttctttgaatatctcttttcagttcttttgggtctatttctagcagtcaaactgctggctcgtgtggtaattctgtttaacttattgaggaaccaccaaactgatttccacagcagctgtaatctttcgcattcccaacagtagtgcatgagagtcccaatttcttcacagcctcatcaaaacctgttttctgtttgcctcattttgttttgtttacagtagccatcctactgggtgtcaagtgctatctcatggtggttttcattcgtatttcccaaatggctaatgatgttgctgtggtttgagtgcatcccccaaattgtgtgtcttggaaacttaatccccaaattcacatgttgattggaggcgcagcctctgagacggtaattaggattagataaggtcatcggggtgagacccccaggatgcgactggtggctttataagaataggaagagaggcctgaaacgacatacacgctcttgccctctcgccgtgtgataccctctgccgtccccagatgccgggtcacttcccagtccccagaacggtaagaaataaatttcttttctttataaattgttcagtgtcgggtattcaattatggcaacagaaaacagactaagacatcttttcatgtgcttcttggccctctgtacctctgctttggaggaatgtctattcaagccctttgcccattttttaattcggttgattgtattttggctgtgggcttctaaaacttattcatatattctggaaaatagactcttatcagatatgtgacttgcaaatgtttctcccattcactttctggatagagccctttgttgcccaaaagatttacatttggatgtagtccaacttgccaaatgaaaagatatctgtggctttgcctttggtgtcatactgaaggagctgttgcctaatccaaggtcgtgcaaagttacatctccgttttcttcttagagttttatagtttcagcccttacatttagatctgtgatccattttgaattaattctttacatgatgtgaggtaggggtccaggggccttcttttgcatgtggctatccagttgtcccagcgcagtttgttgaggggattattcttcccctccacccattgaggggtgccggaactcttactgaaaataaactttacataaatatatgggtttattcctgactctgagttctgtaacattgacctaatgtatcgatcacgatggcagtaccacccttttcggattactgcggttttgtagtacgttttgaaattgggaagtgtgagtccttcaacttttttcttttctgagattgttttggctatctgagccccttacattttcttatgaattttaggatcagcttgtcagtttttacaaagaaggcaggttggattctgacaggcatcacgatgaatctgtatattgccttggagattatgggcatcttaacaatattaagtgtcccaatccgttaacacaaaatgcctttcgatttatttaggtcttctttaatttattttagcaacgtcttgaaattttcagagtatacatcttgtacacctttagttaaatttattcctcgacattttattgtttcgatgctactgtaaaatgaatcatttccttaatcttattttcatgttattcattgctagggtgtagaaatacaaccgactgttgcagattgatcttggatactgcaactttgctgagccgaatatgctttgctgagcatactcagacagggttggcatattagtccgttcctacactgctataaagaactgcctgagaatgggtaattcctaaagaaaagaggtttaattgcctcatggttctgcaggctgtacaaggcttctgcttctgggcaggcctcaggaaacgtgcaatcatggcggaaggcgaaggggaagcaagcaccttcttcacatgttggagcaggaggaagagagagagaacgcacgcaaagggggaagcgctgcacattttcaaacaatcatcagatcttgtgagcgctctatcagaagaatagcaagggggaagtccgcccccatgattcaatcacctcccactaggcccttccttcaacaggtggggattacaattcgacatgagatttgggtggggacacagagccaaaccgtctcagttttttttttttttcttttgttggactctttagtgtcctctatataagaacatgccatctatgcatctatgaatagagatggttttacttgttcctttccgatctggatgccttttatttctttttcttgactaattgccctgactagaactttgagtacgatgttgagttacaagtggcattcctgatcttagggggaaatcaaccagtctttcaccattaagtatgatattatctctgggtttttcatggatgccctctatcaggttgaagaagtttctttctgttcctggtttgttgaatttattttcatgaaagggtactgcgttttgtcaaatgatcctttttgtacatgattaagatgaccatgagccccctcccccgcccccgctccgccatgcattctgttaatatggtgtattatataaattgattttcacatgttgaaccaaccttacatttgtgggataaatcctatttggtcatagtgtataaagagtggtcaataaacatttcgttgaaagaataggagtggatctggcaagcttcttggaggacaatgtgtgtgttaaagaatctgtagcatgatgagaagccaaggcaccggtgggaggaggggagttgcaaccaattcattaaggctggagagtacgatgccagtggagcagtagtggttgatgtggctgggaaagaggtaggcaggagccaagacatggaggttctattatgccatgctcaggttttagaataccctgtaggctacactgaacccactgtggtctttcagcttgggagtgacgtggtctgatttgcctctagaaatatcaccctggaagctgtgtggagaatagaacagagaggattgtgtgtggagaatagaacagagaggactgagattggaattagaaagctgctgtattataccagtcaagaaatgacagatatctcaactaagacaatggcattggtagataagactaggggacagagtccataaaaagtttaggtagtaaaatggcacacagtagacactcactacatattactcatactggtgaacctagctggagacatgataattcatgtgctcattcttcaaaaaatattgaagggtagtgccaggtatactgtgttaagcattgagacaacaccaacgagaaatattctgttgtataaataggccacattttgtttatctactcatcagttgatgaacagttcattaaatgatttccatggcaggggaggtaaatgttgtcctctatcctcttagattctccagctaggacttaaataagatagattaacaaaagaaaagcatacaaaattttatttggcattttttacatgtacatgggagccctcataagaaatacgaagactcaagtgattaattacagctgaatacttacatactagggtgggaaaagtatggtaaattgtgaaaacataacaagacattggggtttgggctaggagagttaattgtggaaaagtcactaagaaggtaagagttgtgtaacaaggttttttggtgcagctttccctcaagcctggactccccatctctggcaataagaatgtgtttcttcttcctggtatacagataatacctttcacatcagagtttcatctcttcctttcatgaaaaaaaaaggaaggtcagtgtgcccttcttgcatctgctactttcaagtgcctttaaacacaaaataatcaatatgccaaagtggcatattttgaggtggcatttgatcccctacattactgattggatagtgtgaatagtgctgccatgaacgctcctgtacaagtgtttgtttgaacagatgttttaaattgcagacgctcctcaacttgggatggtattatatcctgataaacccattgttagttaaaaccattattagtgtaaattcatttaatacagctatattagtccattctcacactgctataaagaactacctgagacttggtaatttatgaagaaaagaggtttaatggactcacagttctgcaggcttaacaggaagcatgactgtgaggcctcaggaaacttacagtcccagcagcaggtaaaggggaagcaagcacgccttaccatggtggagcaggagagacagagagtgaaggacggaaatgtcatacacttttaaaccatcagatctcatgagaactcactcactgtctcaagaacagcaaggggaaatccacccccatgatccaatcacctcccaccaggcctctcctctgacacacggggattacaattcgatgtgagatttgggtggggatacagagccaaaccatatcagcggctaacctaccaatcatcataatttagccaggcctaccttaaacatgctcagaacacttacaattaggctacagttgggcaaaatcatataacgtaaagccaaatttataatgaagtgttgactatctcacgtaatttattcaatattgcactgaaagtgaaaggcagaatggttgtatgtgtactttaagtacttttatgcatatggattctactgaatgcatgttgctttcataccatcataaagtcaaaatattgtaagtccaaccattataagctgggaaccatccatatttgaggtacatacccatgaatatatttatgggtttatttcttgcttcttaattctattccatttatatatatgtctgtccttatgccagtaccacaaagcattgataactgtagctttatacgaagttttgaatttgggaaatgtgagttatccagctttgttattttttaggattattttggctatttgaggtcttgcacaattacacatgaattttaagattggcttttccatttctgccaaaaaaaaaatggccattgggattttgatgcagattgtattaaatctgtagatcactttgggtagtactatcatcttaataatattgtcttccaattcatgaacacaggatatattttcacttctttatgctgtctctaatatctttcagcaatgttttgtagttttcagtgtacaagtcttttacctccttagctgaatttattcctaagtattttattctttttgatgctattttaaatagaattattttttattttgttaatttcatctcagattgttcattgctagtgtgtagaaatacaactgatttttgcacgttgatcttatatcttgcaactttgctgaattcgtttattagctctatagtgttttgtggattcttcggggttttccatacataagctcatgttcatctgagaataagatagctttacttattccttttcaatttggatgccttttatttctttttttcctaattgctctggctaagacttccaatacaattttgaatagaagcagtaaaagcaggcattcttgtctcgtttctaatgttagggaaatatctttcagtcttctaccattgagtgtgatgttagttttgggtattttatgaatgctctttatcatgttgtggattttctcttccatttctagtttgcttagtggtttttttttttttttttttttttggtcatgaaaaggtgctcagctttatcaagtgatttttctgcatcaaccagaatgaacttgcaggggtttttttccctatattttattaatgtggagttgactgggggattgattgtcttatgttgaaccagtcttgcattattgggataatttccacttgagcatgggctataacctttataacatgctgctggatttggtttgctaatattttgttgaagatttttgcacctagatgcataagggaatattatactcacatattcaattacatgcaatttgtaattttcttttcttgtgatatatttgtctggctttgatatcaagatatggtggcctcatagtatgagttgtaaagtttactctccttttctgtctcttggaagagtttaagaaggattaatgttaatccttccttaaacatttagtagaatttaccagtgaggccttctagcacaatgcctggcacataatatatggaatctaggatttgtatagtcagtcattaactatttgttgaattaataaattgtctccccaagcaggtttctaatcaaggcacaaagattgagtaacgaatgaaggcaaagccaatgtatacagggtattagttttctaatgctggggtggcaaattaccacaaacttaatatggcttaaaacaacacaagtttattatcttacagttcgatagggcagaagactgacccaagtcttactgggctaaaatcaaggtgtcatcagggctgcatttctttctggaagctctagaaaaggatcctttttcggtcgcctgtagtcccagctactcgggaggctgaggcaggagaatggcgtgaacccgggaggcggagcttgcagtgagcggagatggcgccactgcactccagcctgggcgacagagtgagactccctctcaaaaaaaaagaaaaagaaaaggatcctttttcctttcttttccagcttctagaggccacacacattcattaactcatggcttccttcctccatcttcgaagccagtaacattgcacctttgtgactattcttaagtagtcacgtctccctttgactctcctcttctgcctctctctctcactttcaaggcctcttgtgattacattgggccgacctggataatccaggatattctccctattttgacatcagctaattggcaaacttaattccatctgcaaccttaaatccctcttgccatgcaacataacacagtcaaatgttctggggattaaaatgtggacatcactgagagatcatattcttcctagcacatacggtttagtcacaagttaatgatcaacatttattagctatataatactcttaagttcaacataaactttttggatgctgataaaacggaatggcattttacattgatatatacttcatttcaaaacttcttctacttctcaatgattattctgtagcaacaaatttcttttaaatcagaaatttggaaacataacgagacctatctcaaatcaaagatgactatccccttttggagtcagactacacattcattattttagtcaaaatgagacataaaattcaggcccccaagagctgccagtacccacttacgcaggaggtagctagacgaaacaggtagctttctacaaatgattttgcaccatcccaccccagagaggtggtttggagtgtttacttattacctgggatttaattatactagctcttgcaaaagccaaatctaaaggccataaatagaaggtcaaattttctcctatatagaaaggagagcagcagagaaaacaaaatccttggtaaatctttaaacaaagttatatggtttgaatatgttattcattctattttaaccccccaatacagatatatttataaaaaagaatattgtgatttctggtataacttgtttaggaacaaagccacaaatttattaatattttctattccctgggaagaaaaaaatgctacatggcagaataattttttaaaatttccagccgggcacggtggcttatgcctgtaatcccagcactttgggaggccgaggtgggcggatcacaaggtcaggagattgagaccatcctggctaacacggtgaaacaccgtctctactaaaaatacaaaacattagctgggtgtggtggtgggcgcctgtagtcccagctactcgggaggctgaggcaagagaatggcgtgaacccgggaggcggagcttgcagtgagccgagatcgcgccacggcactccagcctgggcgacagagcgagactccgtctcaaaaaaaaaaaaaaaaaaaaaattcccatgatactaaactgatgtgtgatcatataatagacttacactgatacctattttagtgtattcaagcagataaaaaatcccaggtgttctatgagtgatatcattttcagtatttcttatgctgtatgccatggtttaaatctaggcctttcgaattggcattactaccatatttctcaaactgtattccctttctcttgaatatgttatgtaattttgtccagaacccagacatgtcaaggtgtcaaatcccacgttttggatactaacgtgtctcattaattcatacagtgggatcattcattaatgcccacattatagactctctctctctctacacacacacacacacacacacacacacacacacacactacattcttagaagatcattctgagaccagggtggaggataggctgtgcattcccagtactctttcacagctgactgtgtcctctgccagtgttttcaaactttactgcttatgaaacagctaagggtcttattaaaatttagattctgattcagtagaactgacatggtgcccaaggaactgcatctcttttaaaaaatctttatttaggtataattgacaaaagttgcatatatttaagaggtacaacttgatgttttgatatattttgtttttcatatatgatgtttgatacattgtgaaatggtcaccacaagcaagctaattaagatatatctatctctttgcctagctacctttttttgtggtgagaacatttatgacctactcttttagcaaatttcaagtatacaatattgtttactatagttactatatcgtacattagatctccagaactaatttatcttgcataattgaaattttgtaccctttgatcaacatctccctgtttcccccacaccacagtccctagcacctaagattctactgtctgcttttatgagtttgaccatcttagattccacatatgaggtcatgaagtatttttctttcagtgtctggcttattacacttagcataatattttccaggttcatccatgttatcacaagtgggaggattttcttctattttaaggccaaataatattttataattgtgggaatattccatcagatatatatatatcagattgtctttatccctccatccatcaatggacacacttaggttgtttccatatcttgactattgtgaatactgttacagtgaacatgggagtgcagatattcaacatactgattttgtatcctttggatatataacagaagtgagattgccagatcacatggtattcatttttagtttttttgaggaacctctatgctgtttttcataatggctgtaccaatttatttttgcagcaacagtgtacaaaggtttccttttctccacattaccaccaacatttgtcatcttttgtctttttgataatagctatttgctatggtttgagtgttttccccaaaaaacatgtgttggaaacttaattcccaatgcgacagtgttgggaggtagggccgaatgggagatgtttaggttatgaggactccaccctcatgaatggattaatgccgattacaaaagcacctaaggctgtgaatttgaattgctctctcttgccctctttttgcccttctgccatgttatgatatagaaagaaggcctttgccagatgctggcctcttgatcttggactgcccagcctccagaactgtgagccaaatacatttctgttcactacaaattactcagtctgtggtattctgtcatagcagcataataaattagagtccataataagttatagtccataacagactaagacactattctaatagatgtgagggaatatctcattgtgttttgatttgcatttccctgtgggttagtgatgctgagcatcatttatctgttggccttttatatttcttcttttgaaaaattctatttgggttctttgcccatttttaattgggttgtttcttactaatgagttgtttgagtttcttacccattatcagatatacagtttgcaaatattttcatccattccataggttgtcttttcactctgttgattatttcttttgctgtgcagaaagtttttagtttaatgcaatcccagtttctatttttgtttttgttgcctgtgcttttggtgtcatataaaaaaattattgcccaaatcaatatcaggtagcttttttcctgttttcttctaggagttttatagtttcaggtcttatatacaagtgtttaatcaattttgagttgaattttatgtatagtgtgagaaaagggcccaatttctttcttctgcatgtggatattcagttttcccaatatcatttattgaagagactctcttttccccgttgtgtgttcttggcacccttgtcaaaaatctgttgactgtaaatgtgtgaacttatttctgggcttttctattctgttcccttggttgatgtgtctatttttatgccagtaccatactattttgattactggagacttgtagtatattttgaaatcaggaagtatgatgcctctagctttgttcttcttgcttaagattgctttgccaggctgcatgtggtggcccacgcctgtaatcccagcactttgggaggctgaggtgggtggatcacttgaggtcagaagtttaagagcagcctggccaacatggtgaaaccccgtctctactgaaaaaatacaaaaattagccaggtgtggtagcaggcccctgtgatcccagctaatctggaggctgaggtggagaatcacttaaacctgggaggcagaggttgtagtgagccaagatcgcaccactgcactccagcctgggcaacagagcaagactctgtctcaaaaaaaaaaaaaaaagattgctttgcctccttggggtcttttgtgatttcatattaattaaaattttttttttatttctgtgaagaacaccattgagattttgatagggatcacatcaaatctatagattactttgggtagtgtggacattttaacaatactaattcttccaatctaggaatatggaatatcttttatttatctgtgtcttctttaatttccttcataaatgttttctatattttcattgtacaagtctttcatttctttggttaagtctattcctaagtattttattcttttgttgctattgtaaataagattattttctaatttcctttgggatattttatagtgtatagaaacaccactgatttctgtatgttgattttgtatcctgcaactttacagaattcatgtattagttctaacaatttttttttgagtctttagagttttctacatgtatgatcatgtcatctgcaaaaagagataattttactattctcttctatttggatgctttttattttatttattttttaaattatattttaagttctgggttacatgagcagaacatgcagttttgttacataggtatacacgtgccctggtggtttgctgcacccatcaacccgtcacctacattaggtatttctcctaatgttatccctcccctagccccccaccccccaacaggccccagcgtgtgatgttccactccctgtttccatgtgttctcattgttcagctcccacttatgagtgagaacatgcagtgtttggttttctgatcttgtgatagtttttgagaatgatggtttccagcttcatccatgtccctgcaaaggacaggaactcatccttttttatggctgtatagtattccatggtgtatatgtgctacattttcttaatccagtctatcattgatggacatttgggttggttccaagtcttcgctattgtgaatagtgccacagtaaacatacatgtgcatgtgtctttattgtagaatgatttataatcctttgggtatatgcccagtagtgggatttgctgggtcaaatggtatttctagttctagatccttgaggaatcgccatactgtcttccacaatggttgaattaatttacactcccatcaacagtgtaaaagcgttcctatttttccacaacctctccagcatctgttgtttcctgactttttaatgatcaccgttctaactggcgtgagttggtatctcattgtggttttgatttgcatttctttaatgaccagtgatgatcagcattttttcaaatgtctgttggctgcataaatgtcttcttttgagaagtgtctgttcatatcctttgcccattttttgatggggttgtttgtttttttcttgtaaatttgtttaagttctttgtagattctggatattagccctttctcagatggatagattgcaaaaattttctcccatcctgtaggttgcctgctcaccctgatgatagtttcttttgctgtgcagaagctctttagtttaattagatctcctttgtcaattttggcttttgttgccattgcttttggtgttttagacatgaagtctttgcccatgcctatctcctgaatggtattgcccaggttttcttctaggatttttatggtcctaggtcttacgtttaagtatttgatccatcttgagttgatttttgtaaaaggtgtaaggaagggatccagtttcagttttctgcatatggctagccagttttcccaacaccatttattaaatagggaatcttttccccattgcttgtttgtgtcaggtttgtcaaagatcatatggttgtaactgtgtggtgttatttctgaggcctccattctgttccattggtctgcatatctgtttggccccagtaccatgctgttttggttactgtagccttgtagtatagtttcaagtcaggtagcatgatgcctccagctttgtccttcttgtccaggattgtcttggctatgagggctctttgttggttccatatgaagtttaaagtagtgttttccaattctgtgaagaaagtcagtggtagcttgatggagatggcattgaatctataaattactttgggcagtatggccattttcatgataatgattcttcctatccatgagcatggaatgtttttccatttgtttgtgtcctctcttatttccttgatcagtggtttatagttttccttgaagaggtccttcacatctcttataagttgtattcgtaggtattttattttcttagtagcaattgtgaatgggagttcactcatgatttggctctctgtttgtctgttattggtgtataggaatgcttgtgatttttgtacattgattttgtaccctgagactttactgaagttgcttatcagcttaaggaggttttgggctgagatgatggggttttctaaatatacaatcatgtcatctgcaaagagagacaatttgacttcctcttttcctatttgaataccctttattgctttctcttgcctgattgccctggccagaacttccaatactatgttgaataggagtggtgagagagggcatccctgtcttgtgccagttttcaaagggaatgcttccagtttttgcccattcagtatgatattggctgtgcgtttgtcataaatagctcttattattttgagatatgttccaccgatacatagtttattgagagtttttagcatgaaggggtgttgaattttatcgaaggccttttctgcatctattgagataatcatgtggtttttgtcattggttctgtttatgtgatggattatgtttattgatttgcatatgttgaaccagccttgcatcccagggatgaagccaacttgattgtggtagataagctttttgatgtgctgctggatttggtttgccagtgttttattgaggatttttgtatcgatgttcatcagggatattggcctgaaattttctttttttgttgtgtctctgtcaggttttggtatcaggatgatgctggcttcataaaatgagttagggaggattccctctttttctattgtttggaatagtttcagaaggaatggtaccagctcctctttgtgcctctggtagaatttgtctgtgaatccgtctggtcctgtactttttttggttggtaggctattaattactgcctcaatttcagaacttgttataggtctattcagggattcaacttcttcctggcttagacttgggagggtgtatgtgtccaggaatttatctatttcttctagattttctagtttatctgcatagacgtgtttatagtattctctgatggtagtttgtatttctgtgggatcagtggtgatatccccaatatcattttttattgcatctatttgattcttctctcttttcctctttattagtgtggctagaagtctatctattttgttgattttttcaaaaaaaccagctcctggattcaatgattttttgaaggtttttttgtgtctctatctccttcagttctgctctgatcttagttatttcctgtcttctgctagcttttgaatttgtttgctgttgcttctctaattctttaattttgatgttagggtgtcaattttcaatttttcttgctttctcttgtgggcatttagtgctgtaaatttccctctaaacactgctttaagtgtgtcccagaaattctggtacgctgtgtcttcattctcattggtttcaaagaacatctttatatctgccttcatttcattatttacccagtagtcattcaggagcaggttgttcagtttccatgtatttttgtggttttgagtgtgtttcttaatcctgagttctaatttgattgcactgtggtctgagagactgtttgttatgatttccattcttttgtatttgctgaggagtgttttacttcgaattatgtaatcagttttagaataagtgtaatgtggtgctgagaagaatgtataatctgttgatttggggtggagagttctgtagatctctattaggtctgcttggtccagagctgagttcaagtcctgaatatccttgttaattttctgtctcattaatctaatattgacagtggggtgttaaagtatcccactattattgtgtgggagtctacgtctctttgtatgtctctaagaacttgctttatgaatctgggtgctcctgtattgggtgcatatgtatttaggatagttagctcttcttgctgcatttttccctttaccattatgtgatgctcttctttgtctcttttggtctttgttggtttaaagtctgttttatcagagattaggattgcaactcttgcttttttttttgctttccatttgcttggtaaatattcctccatccctttattttgagcctatgtgtgtctttgcaagtgagatgagtctcctgaatacagcatactgatgggtcttgactctttatccaatttgccagtctgtgtcttttaattggggtatttagcccatttacatttaaggttaatattgttatgtgtgaatttgatcctgtcattatgatgctagctggttgttttgcccattagttaatgcagtttcttcatagtgtcaatgttctttacaatttggtatgtttttgcagtggctagtaccagttgttcctttccatgtttagtgcttctttcaggagctcttgtaaggcaggtctgatggtgacaaaatccctcagcattcggttgtctgtaaagaatttcatttctccttcacttatgaagctttaagaggtttaattgactcacagttctgcatggctgtcccataagtcccatgttctttcctcaggaaacctacagtcatagcagaaagggaaataggcacatcttacatggcagcaggcaagagagagtgtgtgaaggaggaactgtcaaacacttataaaaccatcagctctcataagaactcactatcaggagaacagcgtgggggaaaccatccccatgatccaatcacctcccactaggtccctcccttgacatgtgggcattatggggattacgattcaaggtgagatttgagtgggaacatagagccaaaccatatcagtatctaaaaggaaaaaccttcagtttttccacatttggttatgatatcagctgtgagcttttcctatatggtctttattgtgttaagttccttctgtatctatcttgctgaaagtttttattatgaatggatatctagttttgtcaaattctttttctgtattgatcgaaataatcatgtgtttttcatctttcattctgataatgtggtatatcacattgattgatttgcccatgttgaaccatccttgcatcctagggataaataccacttgttcatgatgaatgatccttttaatgtgctgttgaatttggttggctggtgttttgttgaggatttttgtatccgtgttcatcagggatattggcctgtagttttctttcttttcttttcattttctttttctttctttttttttttttttttttttgagacagagtcttgctctgtcacccaggctggagtgcagtggtggtatgatcttggctcactacaacctccacctcctggattcaagcgattctcctgcctcagcctcctgagtagctgggactactggaacatgccatcacacccagctaatttttgtatttttttagtagagatgagttttcaccttgttggccaggctggtctcgaattcctgacctcaagtgatttgcctgcttcagcctcccaaagtgttgggattacaggcttgagccaccacacctggcctggcctgtagttttcttttctagtgttgtttttgcctggatatggtatcagggtgatgttggctaataaattgtattttgaagtgttctctcttgtattttttggaagagtttaagaaatactggtattaatacttcgttgaatgtttgatggaattcatccatgaagccattggtcctgggcttttctttgttggaaggtttttgattactagatttaatatccctatttgttgttagtctgttaaggctttctatttctttgttattcagttttggtatgttatatgtttctaggaatttatccatttcctctaggttaaccaatttgttgacacttataatagtcccttatggttctgtctgtttctgtgacatcagttgtagtgtctcctctttcatttatattttatttatatgagtcttctctctttttttcgtagtctagataaggacttgtcaattttgtttattttttcaaaaaaatcaactcttagttttgtcagttatttccaattgtttttttattctcttttttatttatttctgctctagcatttattatctcctttgttctgctacctttgggcttagttttttttttcttctttttgtagttcctggaggtgataagttgggttgtttatttcatatgtttcttctttttaaatataggcatttattgctataaatttccctattagtatgcttttactgcatcctttaagttttggtatattatcaagattttggtttcttctgtgacccaatggtcgttcaagaatgtgttgtttagtttccacatatttgtgaattttcgtgttttcttattgttattgatttgtagtttcaatccattgtggtcagaaaatatacttggtatgatattaatcttcttaaatttattatgacttgttttgtgacctgaaaggtgatctgtcctgaagaatgttttgtgtgtgcttgataattctactgttgggtggaaagttctgtatatacattttaggtccattgggtctattttattcttcagttctgttttgtccttattgattttctgttgggatgatctattcattatagagagtggagtattgaagtcaactatattatattgttatctatttctccttccatgtctgtcaatgtttgctttatatatttaggtactttcgtgttgggtacatatatatttataattattacatcttcctgttcaagtgacccttttattatataatgaccttctatgtctcatgtcacagttttttacttaaagactattttttctcatacaagtatagccacccctgctctcttttggttacagtttgcatggcataactttctccaccccttcactttcagcctatgtatgtccttaaatcaaaagtgagtctgttatcaacaacatgtagttgggtcctgtttatttttgtttcttacttcccatctctgaattgttggctttttaaaaagcccattcagttactctgtgtcttttgactggggagtttagtcaatttacacttaaagtaattattgataggttaggactttctgttgccattctgttaatagttttctgttttgtagttttcttgttcctttcctctttttctttctttgtggtttgatgatttttgcttggatgtgttttgattcttttctctttatcttctgtatatctactgtgtgggggggcggtcgggggggttaccacagggatcaaattgaacactttatagttatggcagtctgttttaagctgacaacaccttcaatcacatacagaaactctatactttactcattccccccgccacaactttatgtaatcgacgtcatattttacttccttctatattgtgtttccattgacaaatttctgtcactatagttactattactatttttgtcttttaatttataaattaatattaatagtgatttataacaatcattatagtgttacaatagtctatgtttctctttatatttacctttagcagtgaaaggattcatatgcttttgtgttactgttttttttttatttcaacttgaagaactattagcacttcttataaggcaggtctcatggtgacaaaccccctcagtttttgtttgagaaaggctttatctttgtgttcattcttaaaggacagtttttccagataaagtattgttgattggatttttttctctcagtactttgaatatatcatcccactctttcctgacctgcaaggtttctgctgagatatccactcatagtcttatggagctcccctataggtgacaattcactttcttcttactaccccaaaattctcttttgtctttgttgaaaatttaattataatgcatctcactgtagacttctgtgggtttaatgtatttggttatctttgggcttaatgaatccagatggcacttcccctccatagatttggggagttctcacctattatttctttaaataagtttcctttctctctctcttctccttttaagatttctataatgcatctatcattttgcttgatgatgtcccataagtcctctgttcttccttcactctttctcattgttctttttattccgctaactagataatttcaaatgacttgtcttcaagtttacaaattctttcttctgaatgattgagtctgctattaaagatcgctattaaattttttagttcagtcattcttcagctatattcagcaatattctttagctacaggatttttatttggttcttttttatggtttttatttctttattaaacttctaatgttgttcatgtattgttttcctcattttgttagtcgtcttcctgtatcctcttgtagctaattgagcttctttaaatgattattttgaattctttgtcaaaaatttcatgaatctccatttcttcagggttggttactggagctttattagttccctttggtgatgtcatatttgcctgattcttcatgatccacatagcctagcattggtatctgtgcattggagtgagctgacacctcttctggtctgaagttgggtactcagacaatgggcccattaccagggctttggataggtgtagctctcactgggtccttgagtgggcaggactgcctgcagaccatgatgcagtgggcctggagctgggtcaaagggctgcttcagggtccccacttgggcccacagtcagtgggcctgttatgggggcacaggtaagtgtggattcaggcaggactgtctccagaacatggtacagcaagactggagttggctcacagggttacttctgagtccacagtcaggtctagttggtgggcctgcttccagaggtggactggcatgactcccacctgtttcctaagtaggcaaaacttccccaagaccatggtagtgtggtactgaagctgctttaggtacagggctgcttcagagtccacagttgggagccctgttactggggttgccaatgggagttgctcctcccagattcctgggcagatagggatagtggtaggaccacatacaaacaactctggagctaagtccccagggtggtgggctgcttctgggtccacaaccagaactacagttgacaggcctgccgctagaatgtgggcctgccttattaaagtattcatctttgttcttgagctctaccagggtttctcaacctcctacctgaatcccaaggctcccacaaagacacttttgtccatagatcattgtcaaattattgttcctgtgggggaacaagagctagggacctcctatcccatcaactcactgataccgttctcctgatgctgcattttgaattgccctcaggtgatgctgctactcctggtctgtggaccatgctggagtagcagagcccaaatggcttcctcaacttttatgagccttttacaggaactcaaagtagaaaataacttcacttgccccagacctaataatttcctttgttcccacttcttcttggtgctttcctcctttgtgtctaccatcgtaacatccatctaaccatagttgtcttatgtagatgttggatgctgttgagaaacgcacaaagcaaattagaaggaagatatgattgacagaaattgctttttactctgtattcactttccatgtatttgtgctaatctctccatacaggtcttctttggcaatgtggattcatctgggataaaacacaatatttttaaccctccaattattgctcgatacatccgtttgcacccaactcattatagcattcgcagcactcttcgcatggagttgatgggctgtgatttaaatagtaagtgccaagtcatcccatatccttcttccctcaaccatgggtagggtgactaactgttctagttatcctgagactgggggaggggttcccggtatcaggacacaaaattgtcagtgctaaaaccagcatagtcctgggcaaacccagaaataccattcaacccagcagtcccatcactgggtatataatcaaaggaatataaatcattctgtcataaagacacatgcacgcatatgttcatttcagcactattcacaatagcaaaggcatggagtcaacctaaatgcccatcaacaacagattggataaagaaaatgtggtacatacataccatggaatactatgcagccataaaaaagaatgagatcatgtccttttcagcaacatagatgcagctagaggccattatcataaatgaactaatgcaggaacagaaaaccaaatatcatgtgttctcataagtgggagctaaacattaaatgcacatggacacaatgatggacactcaggaggggagaggttgggaggggggtgtgggttagaaggttatgtattgtgtactgcactcactacctgagtgaggggatcattcatacaccaagcctcagtgacatgcaatttacccatgcaacaaacctacccatgtacccctagaatctaaaataaaagtagaagaagaaaagaaacaaagaaaattaaagagtcacacaaagtgggaagagctggctggaaaacagatagcaataacagaattggccgggcgtggtggctcacacctgtaatcccagcactttgtgaggccaaggcgggtggatcacgaggtcaggagatcaagaccatcctggctaacatagtgaaaccccaactctactaaaaatacaaaaaattagccgggtgtggtggtgtgcgcctgtagtcccagctactcgggaggctgaggcaagagaatcgcttgaactcgggaggcagaggttgcagtgagctgagatcatgccactacactccagcctgggtgacaaagcgagactccatctcaaaaaaacaaaaacaaaacaaaacaaaacaaaaaaccaataacagaatctgtgcaaaagttaaaacctgagaaatgatattatgatgacagtagccctagaatatcagtggaagctgctcagtataactgaggctgaagcatgtccttgtgataaccttcttttttcttttctttgaggttgcagcatgccattgggaatggagagtaaagcaatatcagatgcacagattactgcttcatcctactttaccaatatgtttgccacctggtctccttcaaaagctcgacttcacctccaagggaggagtaatgcctggagacctcaggtaagaggcaacagatttactgtttaactgactcagagcagtggttggggaaaaaatcggggaaggccttgactgtttcttctgaggtatttctgtcaactgttagttctaaaaagtgtgtcaaggaagtttggttatgggcagacaaccacacaggcatttgggggaaatgatctctaattgaacctcctggaagaagaatctctatatctagtactgagctaatatctgtcaaagaattgtagaagctaaagtccattttacagataaatatcaacaattagctttctttccaggtttctcattacatcaatgaaaagtaaacatttactgcacatcttagtatccctaggatgagcctagggatacaaaggtgaattgtgaaaaattttggccctgaagttgcttagagttgaataagagagactgactagccaatagaaagtggaggctgggtgcggtggctcatgcctgtaatcccagcactttgggaggctgaggcgggccgatcacaaggtcaggagttctagatcactcttttgctgaggcaggataatcgcatgaacctgggaggcggaggttgcagtgagctgagatcatgctattgcactccagcccaggcaacagtgcctgactctgtctgaaagaggcagagagagagagagagagaaagaaaggaaagaaggaaggaagaaaaagaaagaaaggaaggaaggaaggaggccgggcagagtggctcacgcctgtaatcctagcactttgggaggcctaggtggcagatcacctgaagtcaggagttcaagaccagcctggccaacctggtgaaacctcatctctactaaaaatataaaattatctggacatggtggtgggcacctgtaaccacagctactcgggaagctgaggcaggagaatcggttgaactcgggaggcagaggttcagtgagctgagatcatgccattgcactacagcctgggtgacagagcaagactccgtctcaaaaaagaaagtagagtgagaagtgctgtggtatggttaagagggatttgggaatttctgggagtaaatggtgaccaagaggctactagtccaactctattgccctcaggtgaataatccaaaagagtggctgcaagtggacttccagaagacaatgaaagtcacaggagtaactactcagggagtaaaatctctgcttaccagcatgtatgtgaaggagttcctcatctccagcagtcaagatggccatcagtggactctcttttttcagaatggcaaagtaaaggtaagctggtctccttggaaagaaagaaagaaagaaaaaaaataccacctctcctagagcttaacataacataaaaaggttgatatatgaccaaattttcagagcaaaatttattaagtacctatggtagcaagacattgtaaaaggcattctgagagaacacagtgactttaagaaaaaggtaaaatactgagaaaagggcagagtagatccaagagttaattctcctcatcagcaccttgattcccaagcctttttgacctttaagtttagtggtccaggaagtcttcattcttaatctgggtttgctggataattcaacaaattgtcctgattaaaagacatgacataaagtcttatcaccccatgagtaatgggggaaggaatagttcctctctttggtattttttatattcttttttcaccaagaattaaccatgatgtggtccttaccaatctctctaatacagtctcttgccacttggctctttaagctccatccatactaagaaattctcaggtcactaaatacagccattatatctcataccaggcttttaaatagatactatttcttctacctggaacatttttctagctaccctctactgccactttcacctgactcattcgttaagtctcaggtaaacatcatgtccaagaagaattcccttatccatcaaggctggatgaaagacttcaccaaactggcagtttggtgaactgaagtctagacattggatattctagaagaaaaattcccatttaaaaaaggttatatctctgattagtgccacaacatgatgaactttcaaaatatgctaagtgaaggccgggcgcggtggctgatgcctgtaatcccagcactttgggaggctgaggcaggcagatcacgaggtcggtaaattgagaccatcctggctaacacagtgaaaccccatctctactaaaaatacaaaaaattagccaagcgtggtggcgggtgcctgtagtcccagctactcgggaggctgagacaggagaatggcatgaacccgggaggcagagcttgcagtgagccgagatcgcaccactgcattccaacctgggcaacagagtgagactccatctcaaaaaaaaaaaaaaaagaaaatacgctaagtgaataggccagacataaaaggatagatattatatgattctacttatatgagtgtgttagtcagggatatccaaagaaatagaaccaataggagattctgtctgtctgtctctctctctctgtctctctggatgagctaaactgttttagttcaagactgaaagcaggaaaaagctgatgttccagtccaaaggcagacaggcagcaagaatactttcttacttggggaagactcagtctttttgttctattcaggccttcaactaattggatgatgcctcccacattagggagagcaatctgctttactcagtctactgacttcgatgttaatcccattcaaaaacaccttcacagaaataaccagaataatgtttgagtaaatatctgggcaccttatgaccaagtaaagtagatacataaaattaaccatgacaagtccaccccttgtcaatgtagcacccatcatacacatctcctttatctctaagtagagacaaaaatgaggtcataattccacctaacatgatataacaaaacttggctggtattgataactaccttcttctactacccattctgtattgactttgccttcagcaagcatctcagctgattgtggttctttacctgatgaggtgacccaaacctttattcctgaagagcctgggccactagtagtcctgcatggattgggttgctgtagtttcccattgaccagaatcatagggcctggtaatactaagagacactctaagggatctattgtattccagacacactcttccatacctccattgtgaagcagtagttcagtttccttccaggaaggacaaaacgctgccccttccatgatgaacatattccaatgtaatcaacctgctgccagatagctggctgatcatcctgggaaatactgccatactgaggactctgtgtttgtctctactgctggcagattgggcacttagcagtggccatagccaggtcagccttgttgaatagaagtccatgttgctgagcccatgcatagcctctatccctgccaccatggctactttgttcatgagcccatcaggcagtgacataggtggctgagtaaaaaggatgactggtatccacagaacaggtcatcatatctactttttttttgagatggagtcttgctctgttgcccaggctggagtgcagtggcacaatctcagctcactgcaacctctgcctcccaggttcaagcatttctcgtgcctcagcctcccgagtagctgggactacaggcacgcatcaccatgcctggctaatttttgtatttttagtagagacagggtttcaccatgttggccaggctggtcttgaactcctgacttcaggtgatcctcccgccttggcttcccaaagtgctgggattacaggcgtgagccactgcacccggcccatcatatttacttgattattgaaatccttatctgctgaggtcacccttcgttgagcactcacatgggacataaatatattcacatcctttgcccattcagagagatctgtccacatacctcttccccaaatttctttgtcacctgttttctaatcatgttccttccaagtccctatctggacaaagcactgactacagcccattacttgacatataattgcacacctggccatttctccttctaagcaaagtccacaaccaggtacactgcctaaaattctgcccactgtccttcatgggtatctcagatcgggactgtccacttttgtgtagtacctgcatatcgtgcagaaccgtctgtaaaccaggcccaagactcctcttcctctgtaaactgatcatagggaactcccaatggggccataagtgcaggctgggagagagaaggcagggtagcagaaacaggcaccatggacatttgggctacttcttcatgtaatttacatgtgttttcagtacctgctcagacatgatcatgtatataccacttccatttgatgatggagtgccattgttcatacccaactttatggcttggtgggtcagataacacctagttcatgatgggcagttcaggtcacatggcaacttggtggtctgtggctaagcattcagtatctactaaggcccagtagtaggccaagagctatctcacaaaaggagaacagttattcacagaggattacaggaggatttctcactacagtagcccctgctccataggtcagggaaccaatgtgaagatcctgctagctgctcaatatatctgttccaattacgcattccaggactggggaaataaccacaagatagtctcacagatcctctgcatccactttgagatggacttgagctaaaattccattgatcatttgaccctccataagcccatactctgactggtggaccacagtgacattttgggtctcctgaaattagtgccagttcagagccattgtccagtagtccctgaaaggtctgattaattatttttcttcagtgcacatttattctgatagaaaggccatatgtccctttggggaaggctgagagaaagagtggcagtattcttggcagtgtaccagagtccttcctcaaggagactgagcctccccttcattcaaggagtgctgggtctgtaaacctgctcaagtctgggaattgattgagaggccgtgactctgtttttattattcaggttagacttttgttcacttgacctagaacttttccacttatgcagttcaagaatttggtaggcattctatctatatcacatctaggaacactataatctactagccaacaccataggtctgtgcaagtcatactattctaactgctgctttgactctgctgtcccttatggtaaccacacttaccttgcctttggcagttgagtgctgcccattggccccttccaccccaggatccaattattcccattgtatttaggttttctaattcagtgactgcaggtcctgctgtaaggtgtcacctacagagaagagtgatcacagagcccttcaaggatgctgaggttcccctcacaaatttattcctcaaagtaatagtgagatctgtgtcttctgaactctcccagtgttggtgagtatgtcttaaatgacaaattcactctagcatttcaatctcctttcttctacattaaaccagggcaagtctgaaatttctagtttgctcactgtgggccatcttttggtctgtgtttcagccaaccaattaaactgttagaggccttcctaattccctgagatgcaacattaagtccagaatctctgcttagtgggcccatgtcaataaatttggcctaatccaactttacgtgccttccaccgttatctcacatccttagtacccattcctatacatattctctggattcctgcttgtgtaaattagaaaactcaagtcatgattttggagtgtagtgcaccttgtcatgggtcaccttcatacctcacctcgcctgctgggacttgagtgtagttatagatctaataacaaagaggggtggtagggtgggtcctgaaggaatcagcattatcttgcatggcagttgcctcaggggaagccattacagtttcctcaggcagtgcagggttaatccacttagactggagtagagatactgccaccacagggctggagagaaaactttcactgacaaagaagactcatcaatatttaggagctcaatgtccccagcttaatcagggtcttccacacatacctaatccaacttgtagtgccccattctttcccaatcactgcccttgctttaacagtagacaccctgcaaagctgggagtttggcttgctttgtaattcagttagtcacaggatgagatttggcatttgattttcagcaatctcagctctgtggctacagtagataagggtctccttcagggcatacatagaatctgtcaagtcatttatgcagctcttgagctgggaattcaaattcctgagctcctccttttctttcatcactttttccagcaacattaggagcaaccgactaatcccatcatattcattagtttgacaaatatgttcacaagtgtcaatatacatagtcaccaagacccttgcttcttaaaagtagttgattaggagtatccaatggagatattttgcatatacatattttttgagatggagtctcgctctgtcacccaggccggagtgcagtggcatgatctcagctcactgcaacctccatctcccaggttcaagcgattatcatgcctcagcctcccgagtagttgggattacaggcacctgcctaatttttgtgtttttagtagagacagggtttcatcatgttggccaggctggtctcgaactcctgacctcaggtgatccatccacctcggcctcccaaagtgctgggattacaggcgtgagccaccgcgcccagcctggcctacatatttctattgccagatcatgccatggacaatttttactactgaaaatagtcattagtgtctttaaatttcatcaggttacagaaccaattccagaaatccaataacaaatttataaaatttatccttaaaattctgttcctttagaatcactcttggtgtgaaaatctgtattagtcatggttcccaaagaaacaaaaccagaaccaagaggagatacatacacacacacacacacacacacacacacaaggaattagctcatgtgattatggagtctgccaagtctcaagatctgcagggtgagttggcagcctagagaccccagagagctgattcgtagttccagttcaaagaccagcaggctacagacccagaaagagttaaaatgttttagttcgagcccaaaggcaggaaaaaaactgaagtcccagtttaaaggtagtcaaatagaaggaactgtctcttactaagaggacagtaagcctttttgttatatttaggccttcaactgattggataagttctacccacactggggagaacaatctgctttacttagtctaccaattcaaatgttaatctcaccaaaaaacactctcacagacacacataaaataaagtttaatcaaatatatgggcaccccatggcccagtcaagttgacacataaaattaaccaccataatgaggtatctagagcaggcaaattcataaagacagaaagtagaaaagaggttaccagggtcttggaatggggaagaaatggagagttatttttaatgagtacagagtttctgtttggggtgatgaaaaagttctggaaatggatagtggtaatgggtgcacaatattgtgagtatacttaataccactaaattgtacacttaaaaatgattaaaatggtaaattttatgtatattgtacaacaataaaaaaggctatatcactgacaatgcattgttgtatttagcaaagaaaggggaatctccagcctccccatcaacaaaaacccccacaaacttctattttaaaataatgagctgaaatcatagcggagaggtgaataatgagcaaatataaaaaggaagacctttcctcagacagaatgcccatattaatgttgttactggaagactaagccttgagcaaaatgcaaggagaactcagtgtgagaattctgcattgtcatgaatcccagaaggaagctagagaagttgcagataaatattatcctctggcacctggaagaaccattctcaacctactctagaaaaaaagcacctccagtttaggcctccaggattcctacatattaaaattataagatcacagacatagatcagcaaacatgcaagacaacaagacaacttgagtacaagtgaacagaaacaatcaattcagatttaaaacttgaagaacaccagatattgacattatcggatacataatatgaaataattatgtataaaatctttaaagtaataacatatggaaacatgaaaataaaagacaaattatccaacattattaggcagttgaaaaaaaccattgcaggttacaaagtcaacatgcaaaaatcaattgtatttttatatactaacaattacaaatatgaaaaggaaaacagaaaagtctatttacaatagcatcaaagataatacaatatttaggaataaatttaacgaaggaggtgcaagtcttgtccactaaaaacaaaaaaacccagttgaaagaaactaaagaactgtctggtctgaagacagcaaatatggaaaattagcaactagaaaaaaattaaaaattaaaaattaaaagagaaattaaataactaaataaatgaaaaggcatcctggatttatggatttgaagacataatattcttaagataagaatattaccacaaaccatttgcagattcaaagcaagcattctgggtttttttgtttgtttgtttgttttttgatttgagacggagtctcactctgtcgctcaggctgcagtgtggtggtgcaatctccactcaccataacctctgcttcctgggctcaagcgattctccggcctcaaagcattctctatcagaatcccaaagacatttttttttttgaggaatagaaaaatctatcctaaaattcagatggaatttcaagggaccctgaatagccaaaacaatcttgaaaaagaacaacgttggaggagtcatacttcccaatttcagaacttactacaaagctacaagaatcaaaacagggcagtacttacataaatatagacacatagatcaatggaatagaattgagagtccagaaataagcctatacatctatggtcaattgattttcaataaaagtgccaagaccattttgtgggaaaagaatagtctcttcaacaaatggtgctgggacaattggatatccacatgcaaaagaatgaagttggatctttaccatatacaaaatttaactcaaggctggatgtggtggctcacatctgtaatcccagcactttgggaggctaaggctggtggatcacttgagctcaggagtttgagaccagcctgggcaacacagtgagactctgtatctacaaaacaagaaaaaaaaattagctggcatgatggtacacacctgtagtcccagctactagggaagctgggataggaggatcgcttgagcccaggaggtggaggctgcagtgagccatgatcgcaccactgcactccagcctgggtgtcagagcaagaccctgtctgtaaaaaatcatttaactaaaaatgtatcaaaaaactaaatataaaagctaaaaccataaaactgtaagaaaaaacaaagaggtaaattgttatgatactggatttggcaatggtttcttagatgtgacaccacaatcacaagcaacaactctataaaaatatatatagtaggcatctttaaagttaaaagcttttgtacatcaaagaacactatcaagaaagtaaaaagatgatctacagtataggagaaaaaaattgcaaatcatatatctgataaagggcctagtatcccagaatataaaaagaactcttacaactcaacaacagaaagacaaccaaattttaaaatgggtaaaggacttcaatggaacttctccaaagaagatatacaaggatccaacaaactcatgaaaagatagacaacatcattagttattagggaaatgcaaatcaaaaccacaatgagatagcatttcaaacctgctaggatggctaaattaaaaaaaaaacaaaaacaaaatgtcaagcgggaaaataacaagtgttagcaagaatataaagaaattggaaccttccttgatgatgagaatgtgaaatagggcagccactgtagaaaatattttggcagttcctcagtaaggaaaacatagaattaacatagacccagcaattctactcctgggtgtggacccaaaagaattaaaagcaggcactctaacaaaaactaatatacaaatgcatatagaagtactattcataatagcaaacaggtgaaaacaattcaaatgttcatcaagtgatgaacagataaacaaaatgtggtctatccatatatggactattatttattcataaaaaatcaaagtactgatccatgctaaaacatggatgctccttgaaagcattatgctaagtgaaagcagccaggcacaaaaggccacattccacttatatgaaatacccagaatagcaaatccatagagacagaaaacagattagtggttgccagaagctggcagaaggagtgaatgtggagtggcttcttaataagtattgaatctccttttggggttatagaaatgttctggaactagatagtggtgatggctatataacattgtgaatgtactaaatggcactgaacttcacactttaaaattgttaaaatggtaaattttatgtttgcgaattttgcaatagataagtcagaagacatgtacattaccataatgagtaacaaactgacagctgatttctaaataatagcaaatatcagaaaataatgaatgatgtcttcacaatgctaaaataaacaatgtgaacccctctctcaaaaagaaaacctaatgaaaatatcttttatgcgttaaagcaaaagaggaaattaggacacagacaggcacagagggacgaccacatgaagatatagaaagaggacagacacctacaagccaacgagagaggccttacaagaaaccaacccttagccaggtgtggtagtgtgcacttgtagttcttgttacaagggtgcagtgagctagggttgtgccactgcactccagcctgggaaacagaacaagaccctgcctctaaaaaaaaaaataaagagaaggagaagaagaagaaaaggaaaagaaaaaaaaaaagaaccaagcctgctggccaggcgtggtaactcatgcctgtaatcccagcactttggaaggctgaggcaggaagatcatctgaggtcaggagttcaagaccagcctgcccaacatggtgaaacccccctctactaaaaatacaaaaattagctggacatgctggcatgcgcttgtaatcccagctactcgggaggctgaggcacaagaattgcttgagcccaggaggcagaagttgcagtgagcccagatcgcgccatcacattccagcctggactacagagggagactccatctcaaaaaacaaacagacaaaaaaaaaatacacacacacacacacacacacacacacacacacacaaaacaagcctgcctaccccttgatcttggacttgtagcctccagaactgtgagaaaataaatttctattgtttaagccaggtgtgcgtgtgaaaatttagaacatatgacaacagcaaaaaagtcagcatgtggataaatagaataaaggattctaaaatccatgtattatctaggaggtaaagatgttaatattaaaccttcataatttgattaatgttgtagtttataggatagccagtaagtaatagaaatacacacaatgtaagactcccaaaatggtagaagaaaaaatatgaaaggataaaatatactcaacaaacctaaatgaaagcaagcaaagagagataaagaaacataaaacaggtaggaaaaatagcaagataagatggtatatttaaattgaaatataacagtaatcatatgtaatatgaatggaccaaatatttcagttaaaagacaaagattgtcagattgataaaaaagcaaaagtagctgggtgtgatggctcacacctgtagtcccagctacttaggatgctgatgtgggaggatcacttgagcccaggaggttcagcctggacaagatagtgagacttgtctctttaaaaaaaaaaaaaaaaagcaaaagtaaattgtgtgcattttatgagtcatatctaaaacattagatacagaaaagtagcaagacaaaaatgggaaaagaaattatgcaaatatctaaaagatatcgattacagctctattgatagcagaaaaatagactttaaagcaagaaagtattgctgaagattaagaatgtgatttcatggctggacgcggtggctcacacctgtaatcccagcactttgggaggccgaggcaggtggatcatgaggtcaggaaattgagaccatcctggctaacatggtgaaaccccgtctctactaaaaaaaaatacaaaaattagccgggtgtggtggcggacacctgtagtcccagttactcaggagggtgaggcaggagaatggcgtgaactcgggaggctagattttaacacatctctcgtcaattgatggaacaatgtatagaaatagaacaattaacatgattcacaagtttgatcttatagacatatttagaaaatagcaccttgaaattgcaaaattacaagggtggttccaacatggccgaataggaacagctccagtctacagctcccagcatgaatgacacagaagacaggtgatttctgcatttccaactaaggtaccaggttaatctcactgtggcttgtcggacagtgggtgcaggacagtgggtgcagcccaccgagcatgagccgaagcagggtaaggtatcacctcacccgggaagcacaaggggtcagggaattccctttcctagccaagggaagctgtgacagatggcacctggaaaattgggtcactcccatcctaatactgcgcttttccaatggtcttagcaaacggcacaccaggagattatatcctgcacctggctcagagggtcccacacccacggagcctcgctcattgctagcacagcagtctgagatcaaactgcaaggtggctgcaaggcagggagaggggcacccgccattgctgaggcttgagtaggtaaacaaagcggccaggaagctcgaacttggtggagcccaccgcagctcaaggaggcctgcctgcctctgtacgctccacctttgggggcagggcaaagacaaacaaaaagacagcagtaacctctgcagacttaaatgtccctgtctgacagctttgaagagagtagtggttctcccagcacagagtttgtgatctgagaacggacagactgcctcctcaagtgggtccctgacccccgagtagcctaactgggaggcacgccccagtaggggcagactgacacctcacacagctgggtacccctctgagaccaagcttccagaggaacgatcaggcagcaacatttgctgttcagcaatattcgctcttctgcagcctctgctgctgatacccaggcaaacagggtctggagcggacctccagcaaactccaacagacctgcagctgagggtcctgtctgttagaaggaaaactaacaaacagaaaggacatccacaccaaaaccccatctgtacatcaccatcatcaaagaccaaaggtagataaaaccacaaagatggggaaaaaacagagcagaaaagctgaaaattctaaaaatcagagtacctctcctactccaaaggaacgcagctcctcgccagcaacggaacaaagctggacagaaaatgactttgacgagttgagagaagaaggcttcagatgatcaaacttctctgagctaaaggaggaagttcgaacccatcacaaagaagctaaaaaccttgaaaaaaaaggttagatgaatggctaactagaataaccagtatagagaagtccttaaatgacctgatggagctgaaaaccatggcacgagaactatgtgacgaatgcataagctttagtagccgatgcgatcaactggaagaaagggtatcagtgattgaagatcaaatgaatgaaatgaagcgagaagagaagtttagagaaaaaagaataaaaagaaatgaacaaagcctccaagaaatatgggactatgtgaaaagaccaaatctatgtctgattagtgtacctgaaagtgacagggagaatggaaccaagttggaaaacactctgcaggatattatccaggagaacttccccaacctagcaaggcaggccaacattcaaattcaggaaatacagagaacgccacaaagatactccttgagaagagcaactccaagacacataactgtcagattcaccaaagttgaaatgaaggaaaaaatgttaagggcagccagacagaaagttcgggttacccgcaaagggaagcccatcagactaacagctgatctcttggcagaaactctacaagccagaagagagtgggggccaatattcaacattcttaaagaaaagaattttcaacccagaatttcatatccagccaaactaagcttcataagtgaaggagaaataaaatcctttacagacaagcaaatgctgagagattttgtcaccaccaggcttgccctacaagagctcctgaaggaagcactaaacatagaaaggaacaaccggtaccagccactgcaaaaacatcccaaattgtaaagaccatcgatgctaggaagaaactgcatcaactaatgagcaaaataaccagctaacatcataatgacaggatcaaattcacacataacaatattaaccttaaacataaatgggctaactgctccaattaaaagacacagactggcacattggataaagagtcaagacccatcagtgtgctgtattcaggagacccatctcacatgcagagactcacataggctcgaaataaagggatggaggaagatctaccaagcaaatggaaaacaaaaaaagaaaagcaggggttgcaatcctagtctctgataaaacagactttaaaccaacaaagatcaaaagagacaaggccattacataatggtaaagggatcaattcaacaagaagagctaactatccaaaatatatatgcacccaatacaggagcacccagattcataaagcaagtccttagagacctacaaagagacttagactcccacacaataataatgggagactttaacaccccactgtcaacattagacagttcaacgagacagaaagttaacaaggatatccaggaattgaactcagctctgcagcaagcggacctaatagacatctacagaactctccatcccaaatcaacagaatatacattcttctcagcaccacatccaaaactgaccacatagttggaagtaaagcactcctcagcaaatgtaaaagaacagaaattataacaaactgtctctcaggccacagtgcaatcaaactagaactcaggattaagaaactcattcaaaaccgctcaactacatggaaactgaacaacctgctcctgaatgactactgggtacatagcgaaatgaaggcagaaataaagatgttctttgaaaccaatgagaacaaagacacaatataccagaatctctgggacacatttaaagcagtgtgtagaggaaaatttatagcactaagtgcccacaggagaaagcaggaaagatcaaaaattgacaccctaacatcacaatttaaagaactagagaagcaagagcaaacacattcaaaagctggcagaaggcaagaaataactaagatcagagcagaactgaaggagatagagacacaaaaaaccctttaaaaaatcaatgaatccaggaactggttttttgaaaagatcaacaaaattgatagaacactagcaagactaataaagaagaaaagagagaagaatcaaatagacgcaataaaaaatgataaaggggatatcaccaccaatcccacagaaatacaaactaccatcagagaatactataaacacctctatgtaaataaactagaaaatctagaagaaatggataaattcctggacacatacaccctcccaagactaaaccaggaagaagttgaatccctgaatagaccaataacaggctctgaaattgaggcaataattaatagcttaccaaccaaaaaaagtccaggaccagacggattcacactcaaattctaccagaactacaaggaggagctggtaccattccttctgaaactattccaatcaatagaaaaagatggaatcctccctaactcattttatgaggccagcatcatcctgataccaaagcctggcagagaaacaacaaaaaaagagaattttagaccaatatccctgatgaacattgatgcaaaaatcctcaataaaatactggcaaaccaaatccagcagcacatcaaaaagcttatccaccatgatcaagtgggcttcatctctgggatgcaaggctggttcaacatacgaaaatcaataaacgtaatccagcatataaacagaaccaaagacaaaaaccacatgattatctcaatagatgcagaaaaggcctttgacaaaattcaacaacacttcatgctaaaaactctcaataaattaggtattgatgggacgtatctcaaaataataagagctatttatgacaaacccacagccaatatcatactgaatgggcaaaaactggaagcattccctttgaaaactggcacaagacagggatgccctctctcaccactcctattcaacatagtgttggaagttctggccagggcaatcaggcaggagaaagaaataaagggtattcaattaggaaaagaggaagtcaaattgtccctgttcgcagacgacatgattgtatatctagaaaacaccattgtctcagcccaaaatctccttatgctgataagcaacttcagcaaagtctcaggatacaaaatcaatgtgcaaaaatcacaagcattcttatacaccaacaacagacaaacagagagccaaatcatgagtgaactcccattcacaattgcttcaaagagaataaaatacctaggaatccaacttacaagggatatgaaggacctcttcaaggagaactacaaaccactgctcaatgaaataaaaggggatacaaacaaatggaagaacattccatgctcatgggtaggaagaatcaatattgtgaaaatggccatactgcccaaggtattttatagattcaatgccatccccatcatgctaccaatgactttctttacagaattctaaaaaactattttaaagttcatttggaaccaaaaaagagcccgcattgccaagtcaatcctaagccaaaagaacaaagctggaggcatcacgctacctgacttcaaactatactacacggctacagtaaccaaaacagcatggtactggtaccaaaacagagatatagaccaatggaacagaacagagccctcagaagtaataccacacatctacaaccatctgatctttgacaaacctgacaaaaacaagaaatggggaaaggattccctattgaataaatggtgctgggaaaactggctagccatatgtagaaagctgaaactggatcccttccttacaccttatacaaaaattaattcaagatggattaaagacttaaatgttagacctaaaaccataaaaaccctagaagaaaacctaggcaataccattcaggacataggcatgggcaagaacttcatgtctaaaacaccaaaagcaatggcaacaaaagccaaaattgacaaatgggatctaatgaaactaaagagcttccgcacagcaaaagaaactaccatcccagtgaacaggcgagctacaaattgggagaaaatgtttgcaatctattcatctgacaaagggctaatatccagaatctacgaagaactcaaacaaacttacaagaaaaaaagaccccatcaaaaagtgggtgaaggatataaacagacacttctcaaaagaagacatttatgcagccaacagatacatgaaaaaatgctcatcatcactggccatcagagaaatgcaaatcaaaaccacagtgagataccatctcacaccagttagaatggcgatcattaaaaagtcaggaaacaacaggtgctggagaggatgtggagaaataggaacgcttttacactgttggtgggactgtaaactagttcaacaattgtggaagacagtgtggcgattcctcaaggatctagaactagaaataccatttgacccagccatcccattactgggtatgtacccaaaggattataaatcatgctgctataaagacacatgcacacgtatgtttattgcggcactattcacaatagcaaagacttggaaccaacccaaatgtccatcaatgatagactggattaagaaaatgtggcacatatacaccatggaatactatgcagccataaaaaggatctgttcatgtcctttgtagggacatggatgaagctggaaaccatcattctcaaaaactatcacaaggacaaaaaaccaaacaccgcatgttctcactcgtaggtgggaattgaacaataagaacacttggacacaggtaggggaacatcacacaccggggcctgtcatggggtgggtggacaggggagggatagcattaggagatatacctaatgtaaatgacgagttaatgggtgcagcacaccaacatggcacatgtatacatatgtaacaaacctgcacgttgtgcacatgtaccctagaacttacagtataataaaaaaaaagaaattgcaaaattacacattctttgtaagcacacaaaggaaacatgttagaattttccattttaagctacaaataagctacaaataaagtagtctcaaatttcagataatataaaacatgttttctggtcacaatacaattaaagttgatataaataagaaagataactataaaatcttcctatgttagaatcaagaactatacttttaaacccatgtgtcaaataagaaatcataaattagaaaatattttaaactgaatgataacaaggcatgacatattaaaatgtgggaatcagctaaagcaatatttagaaagaaatgtatagcgttaaaaacatatattggaagagaagaaagcctgacaattaatgagctaaggtatgtctcaagaagctagtgaaacagcaaaataaaccaaaaggaagtagaagcaaggaaataataaagatatgaagtaaatgaagtaaaaaagaaacatacaatagagagaataaagaaaaccaaaagttggttccttgaaaattgacaaacttctggcaagagcaatcaagatgaaaagaaggcacaaataatatcagaaactttaaaaaactggacatcaataaagatcccacaaaaatttctgccaatataaaaatataaaaaatgaggatacttattaatattaaatgttctttcttgttgtatttaccagggattaatccattttacctaattttccaaacttagtgttaaaaggttattaatttaaaaaatccagatccagatggctacactaactatattctaccaatttttcaaaggagaaataatattaaccttgcaaaaattctttcagaaaatggaaaaagatggaatgttattcaattatcttatgataatagcataaccttgacaaccaaaccgaacaagaacaatattagaaaggaagataataggcccgttttattcataaacataaatcccaaacaaaatattagcaatatggatccaaattggatttatgctaggaatgcaagtttggcttatacattagaaaactgatataatttatcacagtgacagactgaaggattatacatattggctgtcctaagcagtgcaataagatgagaaaaagaaggaaaatatgtaaggattgaatatgatgaaacaaactcattgtatgtggaagatatgatggcatagatagaaaatccaaaggaatttatatataaattattagaatttttaaaatttttcaagcttgctgaaaacaaaataaataccaaaattaattgtatttctgtatacctgaaacagttggaaaaatagttttaaatagcatttaaaaattccaagcaggagttgcacattcctgtcagataatggcagctgcctaaatctctccacagtcttcaaaaaccatacatacacatacacacacaattttaaattatgactaaaaccacccataacccatctatagaataaccagaagacaaaaagtactataagtttatatttacaagtagaaaataaatatataaatctagccaaccttgctccagagagaaaccctgtctcaaaaaaaaaaaaaaaaaaaaaaagaagaaagcaaatgttggaaattaactgtcctataaaaacaaaagtgaattactaaatcacaagacccacaaacctctttggtcacatctattaaataaattacacttccatttatcaacagtagagggtactcctggctaagaaacctagtaagccacccagccctcatgtctgcctgcataaatcacctcttattgctgaaacaagaaaatgtaaggaatttctaaatgaacagaaaatagcatatgaagcagatggtattaatgttcttgagtttttattccctctttccttgaaaacctcatcaactttaggcatggccgtacggctcatcttgatcaatagaatgtgattggacatgacatatataccacttccaaatagaagctttaaatgtgattttgtgtttgacacactcttttgtgcctctgctccaggctccagactttaagcctctagaacgataagtgaataaatttcttttgttttaaaggcaccaagtgtgtggtgaatttgttacagtagccctagaaatctaatactaacaaaaagaatgttagagttgaattagaagtgtcagtgagaacttaggaatttaaaaaatcatattcttagcactgttcactgagggaatctagaagtaattacactgcagtaataacgagcccatcccatgcccaaatcttggtctctaactaccattttccagtcaaaagaatctgagctccctagagaaatgactttttcaaggctggatcaaggaaactgccaggcaatcttagatgatcttggtgatcttgatgtgccagaagattaatgggatcatgtgaaaagaacacagaaactggtctgaagggcttcctgttggccagatttgagacaatttgagcatcaaaaggaataatgagggtaatggatcataactggaaaatcagtttgcaaccatcaatgtacttactattgaatacttgtaaagaactttaagggttgctaataccattggataaaagcttgttgtgaaacagaatatttgcatggtctcaaagtctcactccacagattgttaggaaagggaaagggttacctttataaatatagagattaggtggacatcttaaccaagtgatcaaacttagcatcatcaataatgggacaatctggcatcgcatgccccctgatttaatgcagtaaggattaagtctaacaaaagatgtacaaagcctccaaatacagcgtaaacatttgtaaaataatctcagaacagggaccttaatgtttctcaaaaatttttccaaatacagaactttatttctatagatgtttatggtatatttgccatgctatatacattatgctatatattctatgtgctgaagatacaacaatgaccaaggtctttgcccttgtggaactgacatttggtggcggagacagaggaaacagtcaataagcatgtaaagagataaaggaaaagatactgaatgctacaaaggaaacaaataagttgagatttagaacaaaaaagagtcctattttacaagaggaataatgaggaagacctttctaaagaggtagctcagcactttgggaggccgaggcgggtggatcacgaggtcaggagatcaagaccatcctggctaacacagtgaaaccccatctctactaaaaatacaaaaaatgagccgggcatggtggcgggcacctgtagtcccagctacttgggaggctgaggcaggagaatggcgtgaacccgggaggcggagcttgcagtgagccgagatggtgccactgcactccagcctgggcgacagagcgagactccgtctcaaaaaaaaaaaaaaaaattgaggcagaatttcgctatgttgcctaggcttgtctcaaactcctgggctcaagcaatcctcctgcctcagcctgctgagtagctgggactccaggggcatgccactatgcttagtttaagaggtggtatttaaactgagacccgaagggtaaaaaacatggataaaagaagaaacagaaggggtaagagccttccaagcagagggaatcacatatacaaaggctctcatgttaaataaaacaagagttgacattgttgagaaactgaaagatcagctcatctgcgatgcggtaaaataggaggaatgcagtgggagaacagatcagagacttgggcaggggctatattaggcagaacttggagaccagagtaagggggccaaggtgggaacagaccgattaaattggcatctcttgggggggtgggggggtggggaacttacccatgcatcattttttaaaagctccaaaggcgattccaataagcagccagggttgggaacctagggggaaaatgtagctagatgaatgaagatggcccaaacgtcttttgttctgatagctaaactctctgtaggatcacagtgttacttcacagtgcatttgccaggaaaagtctcttcccatttggaatccgaagtaaaactgacaccacacttgaagatgccaggattgttagaggaaaatgtcacccaatagctccaggaagcaggagccctactgttgctgtttaaccacttctttcccattttggtggcaagttgcctccttttacacaaactgcctcaggagatcctaaagatatcatggtgtctgtctgtccttgcaagagcatgcattatggtaggacattgccttcattctgttcctttttctccaagactcttgcttattctcaccatttggctggactttctactgtaggattacctcggaatccacacaaaacccacagggtttcagagttgccttgaattacacgttttgaacattcagatcttcattttcccaaacatccacccagttataggtgacctttgctccaaagtcctggagtagcaaggtgccttgagtcttagactcttcccacttctttctctcttctgcatcccctcctgccaaggttgcccagccacactaaattgcatgccttgctgtgttgcattcgttatcattctaaagttgtcaccaacatgtgcgaaaccagtttatctaataacgatagctaccattttctgagctcttgccatgtactcctcttgccacagcaaatgcattgacaagggagtctgctggccaaagcctgactctcatctccagatggtccaacacagatgctgtgtgtgacccaggacaaagcacttaatgtcactgaggtttgggaagtgggtgagaacactgtagatataaggcctagctagagtgaaggcctccaaagcagggtgctcttaattctagatgtcccagatgcgtaggacagagtcatctagtcatcttccagggtttaatcctggactactggaaacaactagaagtgagaaaagcgtctgtgctttgcagtgaccattgtcctgtcagacaaccaataaatgctatctttcctctttcaggtttttcagggaaatcaagactccttcacacctgtggtgaactctctagacccaccgttactgactcgctaccttcgaattcacccccagagttgggtgcaccagattgccctgaggatggaggttctgggctgcgaggcacaggacctctactgagggtggccactgcagcacctgccactgccgtcacctctccctcctcagctccagggcagtgtccctccctggcttgccttctacctttgtgctaaatcctagcagacactgccttgaagcctcctgaattaactatcatcagtcctgcatttctttggtggggggccaggagggtgcatccaatttaacttaactcttacctattttctgcagctgctcccagattactccttccttccaatataactaggcaaaaagaagtgaggagaaacctgcatgaaagcattcttccctgaaaagttaggcctctcagagtcaccacttcctctgttgtagaaaaactatgtgatgaaactttgaaaaagatatttatgatgttaacatttcaggttaagcctcatacgtttaaaataaaactctcagttgtttattatcctgatcaagcatggaacaaagcatgtttcaggatcagatcaatacaatcttggagtcaaaaggcaaatcatttggacaatctgcaaaatggagagaatacaataactactacagtaaagtctgtttctgcttccttacacatagatataattatgttatttagtcattatgaggggcacattcttatctccaaaactagcattcttaaactgagaattatagatggggttcaagaatccctaagtcccctgaaattatataaggcattctgtataaatgcaaatgtgcatttttctgacgagtgtccatagatataaagccatttggtcttaattctgaccaataaaaaaataagtcaggaggatgcaattgttgaaagctttgaaataaaataacaatgtcttcttgaaatttgtgatggccaagaaagaaaatgatgatgacattaggcttctaaaggacatacatttaatatttctgtggaaatatgaggaaaatccatggttatctgagataggagatacaaactttgtaattctaataatgcactcagtttactctctccctctactaatttcctgctgaaaataacacaacaaaaatgtaacaggggaaattatataccgtgactgaaaactagagtcctacttacatagttgaaatatcaaggaggtcagaagaaaattggactggtgaaaacagaaaaaacactccagtctgccatatcaccacacaataggatcccccttcttgccctccacccccataagattgtgaagggtttactgctccttccatctgcctgaccccttcactatgactacacagaatctcctgatagtaaagggggctggagacaaggataagttatagagcagttggaggaagcatccaaagattgcaacccagggcaaatggaaaacaggagatcctaatatgaaagaaaaatggatcccaatctgagaaaaggcaaaagaatggctacttttttctatgctggagtattttctaataatcctgcttgacccttatctgacctctttggaaactataacatagctgtcacagtatagtcacaatccacaaatgatgcaggtgcaaatggtttatagccctgtgaagttcttaaagtttagaggctaacttacagaaatgaataagttgttttgttttatagcccggtagaggagttaaccccaaaggtgatatggttttatttcctgttatgtttaacttgataatcttattttggcattcttttcccattgactatatacatctctatttctcaaatgttcatggaactagctcttttattttcctgctggtttcttcagtaatgagttaaataaaacattgacacatacaaacaaatgcctttgagaattgtgtttttacactggaaataaaaatgtgaacactgatttttaaaacaaataggggcactgaatagcaagatggacactctagaaaaccaaattagtgagttagaaaaccagattaaattgaactcagagtaaaaatgatataattcatgagagtctgaataaaataaatcagaaatggagcctcaatccaggagaacagcttatatggagagagagagactgagagagaaatgggagtttctgttcaatgggcataaagtttcagctatgctgctgggcacagtggctcatgcctgtaatcctggcactttgggaggccaaggcgggcggatcacctgaggtcgggagttcaagaccagcctagccaacatggcgaaatcccgtcgctaataaaaatataaaaattagttgggcatggtggcacatgcctgtagtcccagctacttgggaggttgaggcacaagaatcgcttgaacccgggaggcgggtggaggttgcagtgagccaagatcgtgccgttgcattccatcagcctgggcaacagagtgagactccatctcaaaaaaaaaaaagtttcagttatgcaagatgaattaagttctacagatctaatgtacaacattgtgcatatagctaacgataccatactgggcacttaaaaatttgttaagagagcagataccacgttgtgttcttactacagttttacaacaatgcaaaaatgcattgtaaacactatgtgcaaatagaatagcaaagaatgtatacagtgcccatgagcataacattctagtggacccacaatgcatcagagttcagtgagactcaaagggagaagaatgttggcaaagtcagtggggaggagaaaatgagtgtgatgaaataggcggtctcattaaacttcccttacaaaacacaagatcaaagataaaattattaagaatttcgagacagtgacatcagagcaaacgaaacatagg

SEQ ID NO: 2 - DNA, 188930 bp, Artificial Sequence
  synthetic construct
tcaccatggctacattctgatgtaaagagatatatcctatacctgggccaaatgtaaacagcctggaaaagtgttaggttaaaaacaaaacaaaataaataaatgaataaatgccaggtggttatgagtgctattgagaaaaatgaagccaagagggatatcagtgatgcaggtgggggtaaagagcttacaacataaatgtggtgttccatatttaaacctcattcaacagggaagattggagctgaaatgtgaaggagttgtgggagtggaactacgtggaaatctgggggaaaggtgttttgggtaaaagaaatagcaagtgttgaggtccaggggcatgagtgtgcttgatattttagggaagagtaaggagaccagtataaccagagtgagatgagactacagaggtcaggagaaagggcatgcagaccatgtgggatgctctaggacctaggccatggtaaagatgtagggttttaccctgatggaggtcagaagccattggaggattctgagaagaggagtgacaggactcgctttatagttttaaattataactataaattatagtttttaaaacaatagttgcctaacctcatgttatatgtaaaactacagttttaaaaactataaattcctcatactggcagcagtgtgaggggcaagggcaaaagcagagagactaacaggttgctggttactcttgctagtgcaagtgaattctagaatcttcgacaacatccagaacttctcttgctgctgccactcaggaagagggttggagtaggctaggaataggagcacaaattaaagctcctgttcactttgacttctccatccctctcctcctttccttaaaggttctgattaaagcagacttatgcccctactgctctcagaagtgaatgggttaagtttagcagcctcccttttgctacttcagttcttcctgtggctgcttcccactgataaaaaggaagcaatcctatcggttactgcttagtgctgagcacatccagtgggtaaagttccttaaaatgctctgcaaagaaattgggacttttcattaaatcagaaattttacttttttcccctcctgggagctaaagatattttagagaagaattaaccttttgcttctccagttgaacatttgtagcaataagtcatgcaaatagagctctccacctgcttctttctgtgccttttgcgattctgctttagtgccaccagaagatactacctgggtgcagtggaactgtcatgggactatatgcaaagtgatctcggtgagctgcctgtggacgcaaggtaaaggcatgtcctgtagggtctgatcggggccaggattgtggggatgtaagtctgcttggaggaaggtgcagacatcgggttaggatggttgtgatgctacctgggccccaaagaaacatttctgggtaaggtgtgcacacatctgtgttattagcagaaatgctaactgccaattcttttcataggtctgacctatttgttgatattttgttctgttttgtccattgcttctcttcgtcatatgctgctcctccagaatctagagactggagtagagggagggtgaagggacaaagacaaaacttccctctgcctgcccaagcttccatagagagaatcaaggcaatgaaatccaatcaatatcacacacaagtttcatgtctggttctcttgtgtgtacatgcaatgtgtgtttttataatatcttttcctactttgggtgtaaggataatatgagccttgagttcagaagcttttcgtgttttgggggttctggtgcatttaggcagagtattaaataactttatcaatattgtctatggtcatcagttgattcagatttttctacctcttcttcagtaaatattggtatattttggtctatactttcatagaaagcaatctactgtccctagatttgataatgtattggtatcaagttatgtaagagtctcctgtgattttgttaaactgttctgtgtctgtagttatattttctttttcattccttatgttgtatatgttctcttcctctcttttaaaaataatatttccaggagttttcttgattttattggtcttgtcaagaattttcttttggtttgatttatcaatctcttttttctttctgttgcatcagtttctgcttctactttcattgatttattccttccttctaatttcctttggttcattttgttgttagatttttgcttcttgagttgaatgctgaaatcatttattttatttttttgtcttctttaaatgtgtattataaagatttaaatataatacatagattgtggctgtgtaaacattaaatgtggtcatgttgtacatactttatattctttttggttctttctgtttggctccccaccctctttccacatcagtccccttctcccccacctcagctaggtaaccccagtatgataatatatattcacatacacatacacacacacaaaggttttcttggacattatttgttttataaaattgggacattatacacacatttctcactcattaacacgtactagaactctaagtcaattggtatagctttaattcattatttttattggctatataagattctatggtatggctgtatcacaatttagtcaatatgttcactttattccagtttttggctactatatcctatatcattacatactggtgcttttacttctgttgaacaaacttgcaagaggaatattaatggaacgaagggaatgtttccttctaagttttaatttccaaagaggtcagaacttttcaaacatttctaccatcgaagtatgaaaatggccttctctctgcattcacatagcgataagttttatcctgtttttaaaatttgccaattttacaggtgtagagtgatattgcatcattactttcattgtgttatttttatttctaataagttgagcatctttttaaatgcttgttggctattggatttatttgggggatttaattagtcatatgatttgcccattattctttggactctttcatttaaaaaaattatgagaacccttttattattacaaatattaactctttgtcatgtatattgcagttttccccaagatctattgtttgtctgttgactttcttataacttttaccaaaacagtttttaatttttataatcagagatatcttttctttcatatcttcagagtcggcaaggttggttaaaaatgtttcccacacctcaagattgtacgtgtaatctcccagattttcttgcaagatgtttactgtttcgctttttatatgcattgcttcaattatctgctaattacttttgtcatatggcatgagagagggatttgtctagttttatttccatccagatcaatagcctattgtgatggcaccttttgccactgatttgaatcaacacattcatcatataaagttctcatatatattagcatatatttctggattcattaggctgtttcactaatctactattatcttgctatgccagtaccatagtgatttgattacagtgagcctatgatatcttctgatatctggtgggtgaaagcaatcctcactattctttttgtacctttcttagctattcttagacactttattcttccacataaaactgttaagatatttttcaaattaaaaagatccaagccctgttgtgattctaactgcaatttcattaaactcagaccttaattttattaatgtaataaatttaaatatttttcttattacatttatctctgtgtattttataagtgtgatgctattgttaataagatagttttctcctatttccatttatgagtgcttagtaccaaatagagataagctattggtttgtgtattttcagctttttcttttgagcctgggtctcattttgtcacccaggctggagtgcagtggggtgatctcaccttactgcagcctcaacctcctggattcaagcaattctcctgtatatcagccccccaagtagctgggactacaggagcaggccaccatgcccggaaaatttttgtatattttttagagatgggtttttgccatgttacccaggctggttttcaactcctgagctcaagcattccccccacctcagcctcccaaagagctaggattacaggtttgagccaccgcacccagccattgtatattcatcttaaatctagctaccttaccaaatttgcctattaattctagtaattttaccctaaagtctctgtgagtattgaatcatatcataagttaaatgagacagattttagctcatttccaatatttatagccagttatttcattttcttatcttattgaatttattagaaaacaagagcaaatgttaaataataacaatgaaagtgaacattccttctactctatgattttacttgaaataatttttgtattttgctatttagagtaacatttgctgttttggtttttgtaaatggtgtttattctattctcatttgccacaaaatgtttatcataaataagttttcagcagctggtatcatctgaattgtcttctttgatatgctgatgaacaaattatgttcatagatgtcctgacactaaatacccttacattcttggagtaaaatctactattcatggaatttgatcattagtgggttctatgtactatttctttagactattcttagtagattttcactactcaacctactaataataataaacaaagttttgttggctttatcaaatgaattgatgagtactccatctttttctattgcttagaatagcttaagtaacatttgaattatccattgtctaaaagttaggtgagactcacttatgaatccatttggtcctagtggcatttgcaatatctttaatcacccctccaggctcttctatgataatcagtcaattcaagtttcaacttccaataattatatacctttctaggaagtaactttatttattttttcaattttgttgccacagtgttgcatgtagcactcactcatgattcttttactccacattatctgtagttatgtgccctttcttattcctaaattcctctatctttgctatttatctttttttccttgaataagcttgccaatgacttgtctattttgttgctggtggtgctcttttcaaagaatgggcttttggattttttttttttctagttggtataaagcatttttattttcactgagcagaaaaagaagctattgattcattaactgtgctgctttattggcatgtagctatgcactgttcacacattaatatataaaactcgtcagtctgttttattttgtctgatgggaaaacatgaacagtgagatttcttatgcaaaaagtgaacagttcaactatgctagctccatatacctttattaacattccagagacttatcctctcaacatgatctgatttctgtaggataacttttcaggaaaagtattttctgatcagtgaagcttggagatataaataagcaatcggccaggtatggtggttcatgcctgtaatcccagcactttgggaggccgaggcaggcagatcacctgaggtcaggagtttgacaccagcctagccaacatggcaaaactccgtgtctaccaaaaaaaaaaaaaaaattagctgggcatggtggtgctcacctgtaatcccagctactgaggaggctgaggcaggagaattgcttgaacctaggaggcggaggtggcagtgagctaagattgtgctcagcctaggtgacagagtgagactccatttcaaaaaataaaaaaataaaaaaaagcagtatctctcatattcattaactggaccctgactttcttaaagctcaccccaaagctgaagtccatgaaggcactagttctcaaacttcagtgtgcataagaatcactcgggaagcttattaaaatttacattcctaggccccatcctcagcaaactatttagtccccaggtaattctatcccaccccaccccagctttattgtggtataattgacaaataaaagttgtatatatttaaggtgtacaagataatgttttgatgtaagtatacattgtaaaatggtatagcatgaagggttttcttttcatttttttcagaatagtttgtaatatcttctttgatttcatctttgataatctagacgtatgattttaattgctttttaaatttgtttatcaagttagtttgtagtatttgggtcaacattgaatatcctgttaatttcctattgctgtgtaacaaactacatcaaatgtatcagcttatgacagacccatttactgtctcacagtttctgtgagttagaagtccaggtggactcagctggatactctgtgcagggtcatacaaggccaacaccaaggttttaatagggctgcactccttagtgaaagctcttggggagaatctgcttacaggctcatttggaatgttagcaaattcagttccttctctcactttccatgtagtgccctctaccagcaatggtgcatcaacactctctcatgcttggaattgctctgacttcaattttccgtgcatatctctggccttttttgcctctctcttttacttttaaggactcatgtgattacattgggccgacctgggtaattcagaatactctccccatctcaaggtcagctaatcagccccttaattccatctgcaaagtttaatttgccacataatatatttttggacatgacaccaaggagcaaaggtgatgtgggccaaatttttacctgccacaggtatagtttacatacaatgaagctcatcaattttaaatatgcagtttgatgagttttgacaaatgcatacacttgcataaccaccaccctaatcaacatgcatttacatcaaccctcctgcaactttttaatgagtctctcccactgacctggcctcagccaataaactgctatctggaagttacagatttgttttcacatgttctagaattttacatcagtggaatcatacggtatgtattcttctatggctttttttcttcagcatcatgatttggaaattcatgcaggttgttgtataaagtatttctatcctttttattgctgattactgctccattatgggattatatcataattttggattatttccagttaggagcaaatacaaataaacctgctatgaacagtgctccacatgttttgtgtgaacatctattttcatttatcttagttaaatatctaggagtggaattgctggatcatatggtaagtgcatgtttaagagaaactgccagacagatttcttgaacgtaccattctatactcccaccagcaatgcatgagagttccagttgcaatatatcctggacaacatttgatgttgccagtacttaatgactgcacagtggtatctcactatacttttttttttttttgagatggaatctcatcccatcacacaggctggagtgcagtggcgcaatctcagctcaacatctgcctcctaggctcaagcaattctcatgcctcagcctcctgagtagctaggactatggtcacacgccaccgtgcccagctaatttttgtatttttggtagagacggggttttgccatgttggccaggctggtctcaaactcctggcctcaagtgatccacccgcctcggcctcccaaaatgttgggattacggcttgagccactgcacctggttatacttttaatttgcgtgtctctgatgactaaagatgttgagcatctttgcatgtgctaattagccattcctatatcttcttggaagtgtctattcaaatcattggtcctttgtttttaaacgtagtttcaacttttattttagactgaggaggtacatgtgcaggtttgttacatgagtatgttgcatggtgctgaagtttgggttacgaatgaatgatcctgtcactgaagtagtgaacatagtacccaataggtggtttttcactccttgctacccttcctcctccctctttcctctagtcgtctccagtgtctattattctatgtccatgtgttctcatcatttagctcccacttctaagtgagaacatatggtatttggttttcagttcctgtgttaattcacttaggataatggtttgccagtttttaattgggttgtttgtcttgttattgttgagttttgataattttttatatattctgggtacaagactattcagaggtacctgttttgaatgtttttttccaatctatggcttgcattttcattttccaaatggtgtctttcaaatagtggaaatttatagttgtagttaagtccaatttagcttttcttcttctatgattcatgcttttttttcccctgtcctaggaaatctttgcccacctcaagttcacaaagcctttcttctgttttcttctagaacttttatcattttagcattagtatttaggtttataatacattttgagttaaattttctgtatggtgtgacttttctttctctattgaattcccttggtgcctttgtagaaaattaaatgactgtatataggcaaatctgtttatggattctctagttccatagatgtgtatatctgtgcttatgccagtaccagattgttttgattgttgtaactttatagtaagtcttaatatcaggcagtctaaaacctccaacttacttttttattgaaattgcttttgatatatttaggcttttatatttctgtattaattttatagtcaactagccaactccaccaaatagccaactgggattttgactggaattgaattgaatctgtagatcaatttggggagaattgacatttaaacaatactgaatctttcaatacaacaacatggtatggctttgtttctttaaattttctttaatttccctctaggatattttgtagcctacagagtagttcttgcaagaattatattaattgtatccccaagtattttgagggattcgatgctattgttaattgtatcatttttatttgttttcgttttccaatcatttgttactaaaatatagaaattcaattgatttttgtatattgaccttgttcactctaatcttgttaatttgcattttagctctagtagcgttttgcacttcttttagaatttctacatatacaataatgttgtctgcaaataaagacagtttgcttcttcctttccaaactggatgctttttattttttttttcatgccttactgtactggcaagggcctccagtacaatgttagatagaactgatgatagcagaatccttgtcttcttcctgatttcagagggaaaatattcattattttaccattaagtacaattacttgtaaattttttcatagatgccctttgtcaaattgaggaagtttccttctattcttggtgtgagagtttttatcaagatttgatattagattttgtcaaatgctttttctgcatctattcaaatggtcatatggtttatcttgtttattctgttatggtgaattaccttgattgattttttaatgaggaactagctatgtattcccagggaaaaaatccacctggttgtgacatattacattggtaatattttcgctatggactgaattgtctccacctccccccaccccaaattcatatgttgaagtcctaactctcaagatgattatatttggagatagggcttttaggaggtaaacaaggttaaatgaggccataaggatggagtcctaatctgataggactggtggcctcataagaagagagaaggttctctctctacactcatgcactgaggaaaagccatgtgaacatacagcgagaaggcagccatctaccagctgggaagagggctccactagaaactgaccgtgctggcaccctgatattggatttccagcctccggaactgtgagaaaataagtttctgttgtttaagtcacccaatctctagtattttgttatggcagccctggccaactaaaactgttttgttaagggttttggtggtgatggtggttttttagtttttgcgtctgtgttcatgatggatatttggctgtgattttcttataatgtcattgtctggttttgatataagagtggtattagtccgttctaatgctgctatgaggacatacccgagactgggtaatttataaaggaaagagatttaatggactcacagttccacatggctggggaggcctcacaatcatggtggaaggcaaaggaggagcaaagacacatcttatatggcatggtggcagacaagagagcattgtacaggagaactgccctttataaaaccatcagccctcatgagacttattcactataatgtgaacagcatgggaaaaccccactgccatgattcaattacctcccacctggtccctctcacagcacatggggattgtgggagctacaattcaagatgagatttaggtggggacacagccaaaccatatcaaagagtaagactattctttttttttttttttttttttttgagacggagtctcgctctgtcacccaggctggagtgcagtggtgcgatctcggctcactgcaagctccgcctcccgggttcacgccattctcctgcctcagcctcccgagtagctgggacgacaggcgcccgccaccacgcctggctaattttttatactgatagtagagacggggtttcaccgtgttagccaggatagtctcgatctcctgacctcatgatccgcccacctcggcctcccaaagtgctgggattacaagcgtgagccaccgcgcccggctgactattcttataaaatgagttgagacgtgttcactcttctatttaatgaaagagtttgtgtagaattggtatcatttcttttttaaatgtttattcaccagggaaatcatcttatcccagtgttttttgttttggtttggttttttttttaagggtcttaattgtgaattctatttttaataggtaaagggctatttgaattttctatttcttataggataaattttaataatttcttttaagaaattccatttgagactgggcatggtggctcacacctgtaaccccaacactttgggaggaggcagcaggattgctctaggccaggagtttgagatcagcctgggcaacataacaagacttgacttctacagaattttttttcattagccaagtgtggtaacatatgcctgtagtcccagctacttggaaggctgaggcaggaggatcacttgagcccaagagttcaaggctgcaattaactatggatcatgctactgcactccagcctgagcaacaaagcaaggctctgtctcaaaaaaagaaaagaaattccatctgagctgttgaatttaatagtataaagttcagaatatttccttaccattttttcactccttggaggtatgatttacatactgtaaaaatcacttattttcagtgtggagattcttttcctttcctaaatctccacatttttattgacatatactttacatatcataaaattcaccatttgaaagtgtacaattcagtggtttttagtgaatccgtaaagtgtacaactatcatctttatttaattccagaatattttcatcacctcaaaaagaaaccctgtaatcattaaacagtcacttctaattttcttcctttccccagcccctggcaaccattaacctactttccgtcactgtggttttgcctattctggatatttcatgtaaatgaagggataaaatatgtggccttttgtgtctagcatcttttgcttagcatgttttcaagattcttccatttttgcagaatgatagaggagttaaaataagaaaataaagatatagtaagaatgaaactattttcattttttaatttaaaaaaatcttccatgttgtagtatgtatcagaatttaactcctttttatggctgaataatactccattgtatggatagaccacattttgtttatccattcatctgttgatggacttttggattgtttccccttttggctattatgaataatgctgctatagaacattcatgtacaagtctttgtgtacatatgcttttatttctcttcggaatatacttaggaatataattgctaggtcacatggtaattctatgtttaacttttagaggaactgccagactttttcaaagcagctgcaccattttacattttcactaccaaagtatgagtgttccaatttttccatattcttatcaacacttgttactgtctgtctttttaattatactcatcctagtgtggataaagtgatatctcattgtagtttggatttgcatttccctgatgacttacgttgttgagagtcttttcatgtgtttattgaccatttgtgtatctcctttggagaaatgtctatttaaatgctttgcgtgtttttaattggattatttgttttttagtactgagttgtataagttctttatttattcttaatattatacccttatcagagctatgacatgaaaatattttttcccattctgtgggtagtattttcactttcctaatagtatcctgtgatgcacaaagtttttcattttgatgaaatccaatatttatttattttacccctttggttgcttgtatttttgttgtcatatctaagaaatcaatgtcaaatcaaagatcactaagatttaaacctatattttcttttgagacttttatagttttagttcttacattgaggtcattgatccacttggagttaattttggtatatggtgtgaggaggggatccaagttcgttctacagcctatatagcctgcagatgagcaatgttagtgaccttgaaagtagaggcccaggttgtcagtagcctggcatctaactaaacaaccatttatccattaaagttagccctgttaacaattaatattgagataattttacttaatacactgtgtatattagtgtccatctagcatgcagcctgaggcacagagaataatagtttgagtataaaattgaattgaatggaatacatcattaatttattatctagctttctgttattgtataggcagtcacatgtatttaccagaaaaaagttgatagaatttttattttaatgaaacccttttatactttagattattttgatgctgattaacaggataagctgactctggacacatcctgacagcctctgccaaggtttgaaataaacagctgggaaaattcagttttatattatctgttcccgcagctgctcagtttcttctaaccacaggtcagggaatataataggttttccgattagttttagataaaatgtgaaagaacagttcatgtcaaggacaatggttgccaaatatatttggcaggatttctatattgaatcccaaaggaaatacacaaacaaaaccccacaaaagttaggaaggagtaaaacccaggaaccctggaacattttgtcatttactatgcagatttgcctgaaagtgagacaggcaaataaatcacatgtttctgccagcgtggaaaatattcactcaaatggcaaaggtctcaggctggggagctggatattgtcctgtaataggttcatctcagaactgaatcacacacttggagggtgttaatgctcttaggaacatctagttattccctttgaatagagtcctgtcctgaatcacatatacttgacctagggcctaggcctttttgtttttctgtctcacaatcttgtttctccatcaattatgtgttttcactcttccctcagagagggaaaaagtgtttctgtgtgctcttgatcctgttccctctctgatcttccaatctattgctctataacatattttatatgtgtcttatatcttcattttagtcagaaacatttatttatttatttatttatttattttttgagacagagtctaactctatcccccaggctggagtgcagtggcatgatctcggctcactgcaacctctgcctcccgtgttcaagcgattctcctgcctcagcctcctgagtagctggcattacaggcatgccccaccacgcccagctaatttttgtatttttagtagacagggtttcttcatgttggcccggctggtgtcgaactcctgacctcaggtgatcctcccgcctcggcctcccaaagtgctgggattacagatgtgagccattgggtctggcctttaatcagaaacatttaaagtgaaagcactgtggtaacttatgttgaaataccttagaaatcaatggaaactgcacagagagggggtaggatagacgtagtggaaccaaggatatgatatggaaaaaggagaaaggtagcaaactagggatgagttggtgaatgtggaagggcataataatgttaaatgactgaaaactacataggcttatgttaagactagtgccatggaaatttttagaggtagatgacattagagtatgtttaaatataaattaatgttcttgcagtgagccgagattgcgccactgcagtccgcagtccggcctgggcgacagagcgagactccgtctcaaaaaaaaaaaaaaaaaaattaatgttactggttgtgttccctagatgtagactctgagatgaagattaacatgcaggaattttatttggagtgttcttgggatcaacacctgaggaatcagggataggcagagggagaagcgcgctgccgggtaggctccaggacagccttgctggatcttacagggagctctggagctggaatgaaccttccaggttggaccaacatgtccaggcctctgtgtccctgcactgagcactcatgaagtgctgtccatcctgggacagggcagagtcggcgctgggaagaggcgtggtctgcccagagagggggtggggcctgtcctggaaatgggcggggcatgccctggtagaggggcgtggtctgtcttgggaaggaaggtgcgtggcccccacaggcaacattcctctggggcaatcccggcgcacacctcagcggaggtgaaggctgacttcccacacccaatggctgggactggggagttctttcctagactgccatccgggcgcccctcaccctcttgctgctcagctccaggtcgtcgtgggttcagggctcagctgcacgctcctgcccgcgccctgggcgtgatggcacccccagcccctgccattcttccccctcaccccctctccctgccactgctctgcattgccctgggttagcctggcggggccaggtggcacccgccgtatactcttgcctttctgctgcaggggcctttctgctgcgggtcccagagctgcagggaggggcggcagagactccccacgtggctcattggcgggggtgctaatcagagttcttttgctgccactctttgattcccaaaccccatgtaatcttcttagtggggacacagaatcatctttgaattcatacatatacagcaccttggaggctggccctccatcctcacagagacctgcctccaagctggagttctacctgtgcctggttgtggacccactccctcatctcttttgctgtacaatgattccccaggtctacacggtgctatatggaattccacatcagtgaatcaaatcctctgtaagatttcagatagtggtgctggctaaggccctgaagggaggaaaggctaagttacgccaagattaggtatcacaatgaagtcctgtcctttctaggatggaaggagttcagtgtgtctggccaccgagaagctggtttgtctctgtgatggacaataccatattgcagcaatccccaacctttttggcaccagggactggtttcgtggaagataatttttccagagactttggggttgttgggaatggttacggcatgaaactgtccgcctcagatcatgcggcattagttaggttctcataaggagcacaaaacctagatcccttgcatatgcagttcacagtagcattcgcactcctatgagaatctaatgcagcagctgatctcacaggaggcagagcccaggcggtaatgcaagtgatggggagccgctgtaaatacagatgaagctttgctccctgcctgctgctcacttcctgctatgtgaccccattcctaacaggccacagaccagtactggtcaggggcccaggggttgggcccaatatggcatattgggagctcagcattgatttttgttgctggcaggttggactttggtggcaacagtagctagatcagccttagtcagtgggaagccacgcttttgggtccatgcattaattctctccctgctgctgtagccacttagctcatgtcttgccagtactgcgatggcctatgcagaggctagctgatgtgaattgccagagtcatttttatatgtgttgttggtttgtgcttccttcaagatggatgctttctgttggcattaacgtattacttggagatttttctagtttgtgtccactcactaatatgcctttgtcccaacttttttctggaagagcttccttatcagtacgctgggccctggccctcagccagtacagaaagtcatttgtcaaggccttcagttggcagacgtgctccctggactacgtgctttctcgggtgtcccagaaaccctggaatggagtgaaatgcagggctacgtgggagagcagggaggcaagaattaagtcggccccacctttgcccaactcagtgggtctccttgagagaggtctgcagtttcaaggagacttttcagccaatctgctgcgagatcctgtgaaggggtgtgaaggtcttcctctgtgactatagattggccagtctctccttgtgtgtccaacagttttcattatactttatgtgaattaatgcaaaactgctaggtttaaactgctcaccattttagggatcccttctggattttaccttccttaaggggaaattttcctcctttcctcagttcatcctttctgccttggctttgacgtggtctggaggccacagagcctcctcctgagaacctctctctggtgtgtctgtttgtgtccgtccctctcctttcgatcattccctgtggttcctgttgggcgcggctcccataaacgcacagagcagggtctgctttgtctgcaacctgatgcattgttatttctcaccaaaacttgcagtccaaacatcacatttccgggccacactctttgtcagagctccaggggcacaaccccggggacctgctggaaggtgccaccgtgacgtgtgcctagatgcgttttccctcagttaccacagcgttcctctggttctggtggctggagggtgaccgcgtgcttcatgaagggggtccttactgcttcgcatccacccttttcacggaaagcactttgtcacatgttttcagtgtttctaagcgattttctgccaatcttgtgtgctaagattgtgtggcagcgtttccacagatttatagctggcaatgaattctcccaaaggaaatcagacaaaataaaatgtttccaacattgttcacatactgacaacttatgtgcttccttgggtgattttacaactttttaagcacatgaataaaaattattgtctgcttttttctccttttttctctcttttttttcttgcatgcagaaagtttataggagggggatcctctggatcaacacccatgggggagtgaaggaagcaggattgggtaaaagaagttgaggtgatacagtctgaataaaggtcagtcccacagggagctcaagctaggatggctctgcagagatgttctctattgaggcaagttgtctggacctatatagtcccacctttaccaggaataaggcatgagtttggatgtggtgactgacttcagccaaaattggttctcagagaggaattcagattagagttgtcagctgtcagcacacccagcagcttaggaaataagtgctttagtcctgaagcggtgaatctggacaccagcctccactgtggtccaccctttctgctgctcagattcatttgcttcataagttctggaatggttccttcaggattctgatgggctccctttcctggggaaacaaaagagaaaggtttggaacacagcacaactcctgctgctttagcttttcttgagtctgcaactggtactcatcatcttccccttctactacccattctagatccctccccccaccaccctctcaattcatacttctgctgctccaagtgggttaccagataaggtatctggtcatcatgccctttgtaagccatgactgtacttgtccatttatcatcaacattgaacaagggaatactaagagatacccaggcagatgacctggctgccaaatatattctcctctgtctccattgtgtaatgtcagcccttcctcctgatgatcaggatcggttacgcttgccaggatagtgactcttttccttacctcttggtctcttaatagtgatctgaagtaatatgatggcaaccatagtttcaagtttaatgagactcttggtgtgtccactggcggacatattccccttttaagaaccagtacttctaaactctcagagcccagagttgggataagaggcatagtttccctaattgggtcactgggagtaatggtagtgtgaggctgctcctacttacactccttgttttccaaaaccatatattttacttcgggacacaccccactaaacgatggccattgatctagagtatatactgcatcctgcaggatggtgcctcgtccttaggtattatgtctaagctagtgcctcagctgtgccttcaacaagctgtcctaccactctatcaagtgggtagcttctgggtagtggattccatggtcatgtatcttcttgctttaaagtaggtctcttggtctgatgcagtgttatgtaagatcaaatattctgtgaggccttgaatggtggtgtttactgaggctcaccaagcaactgaatgattttcttgagaaatggtgacatatcagagccttagctttggtctctgttactggcaagttgaacattaacaacatcagtagctagatctgtattgatgagtccatgatgttgggcccatgcatagcctctgccatggctcctcctttcatacatccattttgtaagaattggggcaccaacagcagagactggtaagcatcaaagtggctaagtcattcagtctacttggttgtttagtgctgtttctgtggctgatgttcttttcatttattcattctgtaatgcgtatcctttgtagattcaatttccttctctctgaacaacttctttggatatttattgaaaggcaggtctactgtcaataaattccttaatttttattgtctgagaaagtttttatttctccttcatttttgaaggatactttcacagagttcagaattttaggttgactgttttttctttctctcaacactttaaatatgtcagtgcactctcttcttgtttgcatggtttctgaggcgaagttggatgtaatttttatctttgctcctctatggataaagtgtttttccccatctggtttcttacaacattttttgtctttgattttctggagtttgaatataatatgcctaggtgtagggtttttttatttgtttgctcgtttgcatctatctttttttttttttttttttttttgagacagaatctcgccctgtcacccaggctggagtgcagtggcgcgaactcggctcactgcaagctccacctcttgggttcacgccattctcctgcctcagcctcctgaatagctgggactacaggcacccgccaccacagctggctaattttttttgtattttttagtaaagatggggtttcaccatgttagccaggatggtctcgatctcctgacctcgtgatctgcccgcctcggcctcccaaagtgctgggattacaggcgtgagccaccgcgcccagctgcatccatcttctttggtattctctgagcttcctgaatctgtggtatggtgtctggtgtctgacattaatttgggggaaattctcagtcattattgctttaaaaatttgctcctattcatttctgcattcttcttctggcatttccattatgtgtatgttacaacttttgtagttgttgttccacagtttttggacattctgggcccatgcatagcctctgccgttgttgttggtgtttttttttttttcagtctttttttctctttgcttttcagttttgattggaagtttctattgtcatgtcctcaagctcagagattctttcctcagccatgtctcatcaaccaatgagcccatcaaagacattcttcatctctgttacagtgttttgatctctagcatttcttttttattctgtcttagaatttccatatttttccttatgatatacatctgtcattgcatgttgtctactttttacattaaagccattagcatattaatcatagtttaaaaaattcctggtctgataattatgacattcctgccatatttgactctgattctgatgcttgcttgttcagtctcttcaaattttgtgggttttgccctttagtgtgccttgtaatttcttgttaaaaggtggacatgatgtactggctatgaggaactacagtaaataggcccatagtgatgtggtgagatggaaagaaagaaaagatgctcaacatcactaatcattagagaaatataaatcaaaactacaaagagatactgcctcacacccattaggatggctactatcaaaactaaaacagaaaataatgaatgttggtgaggatgtggagaaattggaacccttgtgcactattgcaaatgtacaatagggcagtttctctaaaaattaaacagaattaccatatgatccagcaactcgacttctggctatatatgcaaaagaactgaaatggggtcttaaagagatatttatacatcaattgtattagggttctccaatgaaacagatccgtgtgtgtgtgtgtgtgtgtgtgtgtgtgtgtgtaaatatatgccaatggtaaaagtacagggtctgagtcagaaggcagaaccaagaatgcttatgtccaagggcaggagaagacagatgtcccagttcaaacagggagagtgaatttgcccttcctctgtctttttgttctattcaggccctcagtggaatggataatgcccacccacattggtgagagtgatcttctttaccaattcacatgctattctcttctggaaacatcatcacagacatacctagaaatactgttttgccatgtatctgggcatctcttagcccagtcaagttgacatataaaattaaccatcatatccatgtttataagcagcattattcacaatagctaaaatgtggaagtactgcaagtgtctattgacagatgaatggataatctaaatgtggtatatacacacaaagcattacgaaagaaggaaattctgacacatgctacgacatagatgaaccttgagtatattacgctaagtgaaataagccagtcatgaaaagacaaatgctgtatgattccacttatattgggtacttagagtagtcaaaatgatacagaaagtagaatggtggatgccagagactggaggaggtgagagttattgtttaatgtttatacagtttcagtttacaacataaaattaattctggaggtagatgggagcatattacacgttttctttttggagatgggatctcactctgttgcccaggctggagtgcagttttgtgatcatagctcactgcagccttaactgtctgggctcaagtgatcctcccaccccaggcaccaaagcagctaagaccacaggtgcacaccaccacgcctggctaattattattatttgtagaggccaggtactgctgtgttgcccaggctggtgttgaacccctgggctcaagtgatcatcctgccctggcctcccaaagtactgggattacaggtgtgtgccaccacacctggccagaatatttaatgctactgaactgtatatttaaacatgcttgggctgggcatggtgcctcatgcctataatcccagcactttgggaagccaaggagggtggattgcttgagcccaggagtgtgacaccagcctgggcaacatggtgaaaccctgtctctacaaaaacattaaccgggcatggtggcacacgcctgtagtcccacctactctggcggctgaggcgggaggatcactcgaacccgggaggtggatctcgccactgcactccagcctgagcaacagagtgagaccctgtcaaaaaaaaaaaaaaaaaaaaaagatttacgatagtaaattttatgtgtattttaccacaattattaaaattgaagaaaatccccatgggtcactggtttaccaatttagccattttcaccatttttagattgcattttccttctctatctcagcattctgactaaaggaaaagcaaaatttcttacaagaatgaatgattctccagtgtggctgctcctgaaaggaacaatgagacttttgttatttcaccacaagactgagaaagaaataaacaagtgataaatgcccagaccccttcttattcattccacatcctggtaatctgaggcatggtgtggcttttactccaagcatatgaatacttacaatcagaagctgcctctcctttccctcactttatcattattgccatcatttatgacaatggagggagtgtctcactggatgatatttggggttctttcttcagtggtccgccataccaagcatttatttgtgctgttctccatctttcacatctaccacttttcaaaagtccctgagagtcaataagacatgcgactcgaacaactgcttcacatctaagtgtatgtctttaaaaatctctccttttccatgtttatgtctgatgtgttttgttatggcaaagtggcatgtagtatacggttcataagtgaatcgatgtatatctgtggagggcaaatgctcaattttagatctacacatgaaagcttttttccagggcaggagccttgctttctccaactaagccttaattacccaaatgcccatgtgttgtgcctttggcttgttgaaatgataccaactggtaaaatctgatgggagataaaagttagatgtccagaagcataaaagtcaggaagagaggctctttatggcatagagaaagctgcagaactgctccatggtgtgcaaaactcatcagcacatgaaactagtgagtggagatagtcaccttcaaccactttgtaatttctaccaattcacttggggccagtgtcccttattcaccaagattcacattggtccttttgattatttggcgtgaggaggcccccagacatgctaaactgtcatgcagggagagaggaaaagttgggaaccagcctttgcttaaaagggctttgacaatggaggcaaataataacattttgggaacatttatataagtaattatataatttctgattcagtagctggttcatgaataaatgagtaattgggagtatctgagtggagacaagaatgaacattaatgtaggactgattctgaattacagcttctggcactagtaggtttcaatatacatagtctgctgaaaggtaattttctctgtgatattcctggtatccctaaggagggaagtataattttaggtacatactgacaaaatttgaacacaaggtacttagatgaaagttatagtctgttttagagatgaaattgaaggatgcagtagctattgctttggcaaaggatttttggctgatgcagtgtatggttattgattttatgattcttatcatatggcacctaatgtatcagttgagttgtgaaaacagtgtttcggtttaatggatgttagggatttatatacaacttcaaatttgcctccttgctaatagtagaaaagagtagtatggaagcattacttccagctgctttttgaagtgtccaccaaaatgaacgactttttcctttcttcacgcagatttcctcctagagtgccaaaatcttttccattcaacacctcagtcgtgtacaaaaagactctgtttgtagaattcacggatcaccttttcaacatcgctaagccaaggccaccctggatgggtaatgaaaacaatgttgaatgctatttatgaaattgggtatcttattttctatcacagattccccaatcttgaggttgcagttaaaaagtgcagctgccaaagagaatgtttccctaactgctacctatagggaaatacactgactgcattttctgtctttttgctgggccgtcttcctctgcttggtctatgccaactgcttacctccacttagatgtcaaataaagtatgtaacaacatgttatgacaggacattttctgtcttagaattgttgctgagaattataggtgggaagtatccccttattctaaagagagatatcagcctatcgatttagaacttgttcaggtagtagtccaaaattggttctgcaacccttaggccctgactcacctccaaccttgtataaaaaaaggctaggaacttatggaagactttagatttgaatatttattatttggagagcctcttcggtgttttatgtgttgcttaccccatggggagtgggaggcctgtccctcatgtcaaggtataatgaaggaggcttcaggagaaccacttagaagactggacaaggtacctatggaacttgggagacactgaccactgcctggtttttatctggataaattttcaaggtcagaggccaaaaggacttctcctgatggaatagcagggggagtgggcaatagtgggagctaactgcactaccattgttaggtgtaaggccaggaaggtcactgaatgggacttgtcttacaaagactctgcctgagaggtcttcctgccaggattagataaccccaatagaaaaagcctgtatgggttgtactgccagaagcagaatctgagaggagagatacaagtgaccagctggagaaggtatatcccatgccaagatcaggagcagtggggtgtctccttgttggcagggagaggtctccaaataactcataagttccctaagaaagaaaggcagaattttggtatgtgtcacaactagggagtactaatgccacattatcactgctccttccaagaaagactttgtcattgtgcctatttgtttttaccctcccccctcctttccacttgctcctaccttggcaggtccagagacacaaaggtgagttggggaggaagattaggagaggaaggtgggaaagcagcgaagctgccaaaacaaattacctttacatattgcagatttctggggctgtcagaatgtagctggagaaggaagggaacttgcaattgcagaagacatcaaaaatttggtattagactggactggacttgttagaacctaagagtgatactgttggttaatacctgaaggttactggaaaagatttgggatcaaccaaagtgcaagaaaagggagatctcacataaagtaattaaaagcagtggtctaagaaaaataaggctattttatgtttttatcccactcaatccagttcattcaacagactgtttataggcattttatacttagtgtattcataaaacagagctcttaattttcctcctgattttctgtcatggcctgactaacaacccagttgcacaagccaaaatcataggagttttctttgactcctctctttttttctatctccacatcatatttatgagcaagtcctgttgactgttcctccaaaacaagttccaagtcttcttattttacttcttgtaaaatccaaattcatccaaattcctgtggcctgcaaggtcctacatgttatgtttcctttttgaccatattttctgttactcctctgctgattcactgtgcttcagccacactttacttgactataccaaacttatttctgcctctggacgtttgcatttgttttatctgttttcaatgctcttccactagatctttgaaaatcttgcttctttttcattagtcagatctctactcaaatgtcacctcctcagagaggcccttcctgactactacactgaaagtatcctctacctcctgcctcatcactttctagcagaccactatcttttatatttataacaacttgaaattttcttatttatttctttatgtgcttaatgtcttgagaatatgatctccattatctgtcttgtttgctactgcacctccagtgcataagacagttcctagaatatagtaggaactctagttgaatgaatgaatgaattgaatgattgccagaaatcttgcctcagagcaaccataaggttaggctgatgttggcagcaagcaaatactactttttgtcagtaattacaggggcatgcttctccactgtgaccttgactctaacttttggaataacaggttttctggagtactatccccaagtaacctttggcggacatctcattcttacaggtctgctaggtcctaccatccaggctgaggtttatgatacagtggtcattacacttaagaacatggcttcccatcctgtcagtcttcatgctgttggtgtatcctactggaaagcttctgagggtgagtaaaataccctcctattgtcctgtcattctatgaatagaacagtgagatgtgtgtgctttgtaatggtggcgttacaactcttttaaggtcctaactgaacattatgtgtatttcttaacatttactagattataaatatctcaagatagggaaatccatcttatttattgctgtgtccttagcatataacatattgcctaccctatagtagatactcaatacaagaatgagggtgtagtggacaccagtcattttttcttcctaaaattaaacatttctcacctgtataccccctaggaattgcttttctgaatatacttcaaacagaacctgccattttcttaaagcccatgcctccctagccatagcagttgatctaggagtgagcagttgacacgggtatcccacctccttggccacagttgattggtccagagatgggcaccttacccaagctaggccaatgagagtacttgcactagcattttgaaatttatgagaaaaaggacctattattaccaggtaatcctatacttaggggatggagcccaaatataataaaatcaagattctactacttcatgtatatcatgtgggccatggatcttataggagtcttaagggggtgttggtcttgtccttttcttagttgcctagctctttgcaggcatggtgcaaaggcaggacaatctacctttatctgctccttctataccactgatcctaccctaaacatgtagctgtataatcagagacaggaagccatggcaaatctggagggtctcggcttggctatatcttaaagagttacatgtattcgtagttcaacattggggaaattttccaaaaattggtggagaaacgagtggccaatgcaattttatctttttttttctgctgacatcagggagagataagagctttaaaatcacaattatggggagataatattttaaaatccagctcaagttaaacccatcagaaaaggtaacaccttttgggacccccaaatggccacatcttatccaatgaggggacaccaaccatagagtctatactgcacagttcaaatggtagccatgagctatcaggcacttgaaatgtggtgagtcctacttgagacatactgtaaaatatacaccagatttcaaaggttaagtacaaaaaagactaaaaatatctcattcattgtttataagtacaagttgaaatgcttatatttggatatactaggttaaacgaaatacattattaaaataatttcacctgtttctttttacttttcttaatgtgactaccagaaaatttaaaattacatatgtggtttgcattatatttctattgaacagtgaaatgtttagcatatgttgaagttgctgctcctgatgcagtggctcatctcagatttggccaagttcttctgtccaaggaaaactaggttcaacccattcctggagaggaacagactcaaatctttctgggctgggtcacttaccttggttaaatctgttctccacctattctaccaacaaccaaagggatggacatagctgaaataaaaatcacgcaatcacactgaatggtatctcacctcaggtgggccttcagcattgcctagccattctactgctacatttcccctaatccatttactctccctctccccaagacagctataatgtttcacacattgttagcctctcattgaacctccaacatgtgctcccgcccctgcccccaccacaacgtgagccttgggaaaaagggtatttttttcctaatgaaatatttcaaacaaagataaatacagaaaataatataacaaacaaacatgtgcccatcacctcactttgccaaatcttaacattttgtcatctttgcttaatttattttacaaaattaagcattttacatacagtctgtactcctctatggggctggcaggaaaaggctctcattgtcaaagttcaaagtaattgatcattgaaaaaataatgatcacattaaaaacaacacttatataatagagatacatattgtaatactcataaatgaaatgatatcctgtctaggattggcttcaaacacatccaagctgatgttacaatcattaggtgaattcctgatgtggaatttgacatttgtatggcgccaaaataatatcccagtgatttttttctgattgtaagtggaaatgttaactttagaatggaggtatcaggctaatccacaggtcagttttagtgtcactaaggatgggatggccagatattatctgcccctgatatggcacaatatgagggactcagcatcatctttgatatattttagccaaaaaacttatttaatttgaatctaatcagaacttaggcatattcaatagcatgggatattctacaggactacaagccaaatttctttcaccaaatgagtgtcagaaaaaaagggactactccatactaaaagagactatgggcctaaacaaccagatgcaatctgcagtcttaggttggattctgatttggaccaactagctacaaaggatgcctttgaggcaattaagaaaatttgaatattgcattgatattaggtgatattaactggatcaggtgtgctagtgtcattttgtttatgtgggcaatttttttttaaagatgacttctaaagtatataggagtggactatcatgaaatttgtaatgtacattaaaatgcatcatcataaaaagtgtgttgaaagaaaaaagtgaaagtagcagtgcaattctaagaataattttctaacatccactcacaaaaatattaaattctttatattaaacacatgaaaaagaacacaaatatatctgtctttcaagattcatctcaaattccacctccttcatcaagcattactgaagagtaggaagcttgtttactttttttatccactgtgttgctcgctccaagggcatagagacttctatcttgatctttatattttcagcttgtagctgagtctggtaaagaataagaactcaataaatatttgtgaataaataggtgaatatttccacatggtattataattatatctttatatgtctatgtcccccaccaaacatagtgttgtaccactaggaaagaacaaagtttaagaaattttcttaaatctctctttcttactgttccgtgaccctcactagtgcctaccaaagagtctgtgacaaagtgtatttgttgttgaattgaattaggcaaaaagatgcaataatggaagcaatttattatttaacagaatgtggagatatcaaccagaacctagtttttactgctcatgctagggttagtgatctcaagatcctctggagtatatgaagcttctccccatttgtggctgctgcttgttagtttttcaaattaagatgcagaaagtaggccgggtgtggtggttcgcgcctgtaatcccagcactttgggaggctgaggcgggtggatcacaaggtcaggagtttaagaccatcctgaccaacatgatgaaaccccatctctactaaaaatacaaaattagccgggcatggtggcacgtgcctgtaatcccagctgctggggagtctgaggcaggaaaatcacttgaacctgggaggcggacgttgctgtgagccgagatccagcctgggcaacagagtgagactccgtctcaaaacaacaacaacaacaacaacaaagatgcagaaagtccgtttcttatgtagaacctattggtgacaataaacttgacatgtttctttgagtgtacagtggatatagaaaggacaattttatttcttcctgctataggagctgaatatgatgatcagaccagtcaaagggagaaagaagatgataaagtcttccctggtggaagccatacatatgtctggcaggtcctgaaagagaatggtccaatggcctctgacccactgtgccttacctactcatatctttctcatgtggacctggtaaaagacttgaattcaggcctcattggagccctactagtatgtagagaaggtaagtgtatgaaagcgtaggattgagatgaaataagcagagaagtacaaacaactgaatctatctataacagttagcatttgtgttccttcacctgaaagaggcttttttactctagcatcatgctcatggaaaggagaataatccagtttctgagagaagcagatatgcattctatataaccacaataaactctaagctgggatcaggaggagctgagttccagaattaaatctctctcctcaaagcattgctattttcctcttcaaatctgtgggctttatcagtagtgatttctactgtcctctgccttttgcaaactttgagctaggttccttgaaaacttcatggaggtaaacacatccaagtgtgtgatcaatggcatatagactggttcaggtggttagtttgtcatctgtaaaccaaaagtatataaaaatctaagaaaagtcagcatttatttatatgttactgaaaattaattaatttggattgaattaatatattctaaaataattctaatcaaacctgtttttaatttataccttagcataaattagggaagtaaattttgcataatttgtttttatcctattttttatggtgaaatcagcttcactgtaccttttccttgttccatttatcttttactgcataactccacaatttagtggcttaaaacaacaacagtctcttattatctctcatggtttctgtgagtctcatggaatttgtcagtgttttgacttggtggcctatctaagtgtgtctcatgaggctgtagtcaaacagtggctagagctgaaatcatcccaaaggtgactttattcacatgtctttgaccttggcttgatggtactctccacatgatctctctcacatgggttttacagggtagccagacttcttatatggtcctgagatagcccattagaagctgtttcacgatttctaatgtaaccttggaaatcactcacataacctacattctattagttagaatgcatcactaagaccagtctataaagggagactccaccttttgatggggaataggcaaagaatttattaacaggaatcaccatactctttctgaatggtgatgatgaatgtgattcaaaaaaaggatgggagcggggagtggagaagatgagaaaggtttgtagtttataatagtttcagatgaaagtatgatttctcatatactgagttcagtttcatagtcataattaatgagaaagtgccaaaaccacagtgtattatttatgggatgtaaaggctaatggaacaatgagatcatcaaaacattagtgtttacatatgacatataaagaaataagttaaaaacccaaatgattctttgacacagagttgaactaaagagtctacagaggttctagttccaggtgaaatggataaacacactccaccctttatttcccattgaacttaactataaaaccttgacaaaatgcaaagcccagatatttaaaaatttctaaaaagcaaatagaacaagtatatagagaaaagacactagaattgaaagtattaccaaacttgtgggggagtatacctttttccccactctagtattccttaacctgaattaaaacataactggagacttcgaagtgagtactatgttgcaaagagagctccaggacaaaccctctggggtttcaaggagtgagaaaggtaactctaaatgctcagagagcgtgggaggggaaatcccctagggtttttgtcctcttttccaccattctctcaagcttcagtcccaggttgcctgtggcaatgacagtggctggcaacagaaacctgccggagtaaaaacttagggaggggaacattattcttcattcagtacagctacagatctaagacattgggggaaaagcacattactttctctctgtctttccccttccattgcttgaccttagctatgatgtagttgtggaaattggaagcttctggttagaaaaccaaaaaagggagctcacagaactggaaagtttatagatgacagagagaaaagatcccaggaaagtaaacccataaagttgtgcattaactcctggattcacccccaacctacacatccaggtatgtagtttcagtgtcagatctgttttaaaccccttgcagtgccattgagtccaacgcagtggccagtctggtgcttgaggggaaatctcagtttcacagtcttcaacatgttccattagcctttacgtcccataaataacacactgtggttttggcactttctcattaattatgactatgaaactgaactcagtatatgagaaatcatactttcatctgaaactaacgcccacagaattccttaaaacatgtctgatggctgaaagcaaagatagaacattgtgagataggttttttaatgtatggtagatacaatacataaaagaatcatagcataacaagaggagggtaaggaaaactttatggtccattcaacttcattccaattcaaatggtaaaatgttgactctaagtagatgatagtgaaaggttaagtatgtattttgtaatccctagagcaaccaataaaaaattataccaagagacacagtaaaaagtcacaataaactaattacaatggtatatcaaaaatattcaaataactcaaaagaaggcaagtaaggagagatgaaaatcagagagaagaagcagtaaaatcataataaaatgataggcttaaatctaaacatatcaatacttacattaagtgcaaatggctaaaacacaccaattaaaaacagagattagcatactggatataaaagcttgaaccaattatatgttgtttacaagaaactcatttcaaaaaaatgatataggtaggttaccagcataaagatggaaaaggatatatgatgcaaacatgaatatgaagaaagttgaagtagtacaaatctgtaatcacaacattgatttttgccaggagtgccaaaaccattcaataggggaaagaatagtgtcttcaataaacagtgctgaaacaggtgaatatctgcatgcaaaatactgattgagtatcccttacctgaaatgcttggaaccaagaacgtttcagatttcagatactggaatatttgcacatatataatgagatagcttggggatggaacttaagtctgaatatgaaattcattttggatataaatcccttgccagttatgtgattggcaaatattttctcccactctatagtttgttttttcattcttttaatggtgtcttttataaagcaagagttatatggacaaacatatgaaaagatgttcaacatcattaaccattagggaaatgcaaattcaatcaacagtgatgtatctattagaatagctaaaataataatataaaattgccaagaatcctgtcaagaattcagagcaacagaaagtttcacaatgcacaatggtatagccattctggaaaacagaatggcagttttgctgcttggtagagaaacagtctctggcagtttcttgtgaaattagatgtacactatagagggatagcaggagggagttctttttggatattgaaatggatctgtatcttgacgatgatggggtttcatgagcttatatctttgttaaaagttatagacctatacaccaaaagaaaaagtcaatttcactataattgaaaatttatataaaagtaattagaatgttttaagacagctttatacgtattttaaatgtgtctctaaagtttttaatccagtacttctggtaaagatggcacagggtcttcctacttagccatttttccatcctccacctcaaccccaacctcgctgaaaaccaacaacaaagataggtaaaccataaatagagaaaatcgaataggcatggtcagctgaaaaagaagataaatatttgtggaccagaagcagaacaggaactgtgagtagtaaaaggggtggaaattacaggccaactgagatctgggtcaggaagccagctgcggtagccaaggagtcaggatgacaaggataaatagtgctccccaccagagggactgagagcccatatcatagagttgggctcttcttcacttgaaagagagctgagcacagctgctgctcactctttgtttagggccatggctttgtggaaactcagagtcctagaagaggggaaagcaaacccagtcctagaataggaactgaactaagttttcttggttcagtgggggaatctgcaatatccccaaggtttccattggccagtatctccaaaattccattctagggtatgatttgctagatagagaatagtgaacacatcctttgcttaatcaaccaatgatcacaagggacagcaaagatcactatagttcaacaaagtcagatttattggctcatggcaacaagagactgtggacacctccctaaacaaagggaaatactgtatagagttagtaaagaattttggggaagggtggaggttaggtgatatttaaatgaagcaaagtagagttgtgtgtaaagaaataaccatgaggtctagactgtgaagtgttctaaaaagttaacatagacatgaaaggttaagtcaaggcaccccttacctgaagcttgagctttaaattgagctgcttctttgtgtcaaagtaatttagatgacctaggaaagaatgagatgtttcattcttgttgctattagttcaaacatttctggcaggctgtgaattcagagaacaaacaactcaattgagtaagaaagcaagagataatcaaagcaaatagttggcattcagtgagtttatacagtggcaatgtgtccttgggagaaatggtgttgttaactctgcagttagctttatctatgtctcttatcccagcctgatgagtagcagcacacgtactgttgctttcttagtccaagctaatttttatttctaagcattaagggtgcgagagagagaaagaacggcaaaatgtcataaacaaaaatctttctactcaaaataagcctgtaaacaaaagtttccagtcaaatttaaaaaatatataattctaagaaagatagccaacaagctcaacagttaaagcatgaaacaagctagtttgttccattaaaaacttcagctatcgatatacacggtatttatttaaaatgtgagtataattagaagcactgtgggctattgaaaaaaaatcatgagtatagatgtttaatatggacaattgctattttactcaaaacttttaatttacaattgcagaagtataaaaagttacaagagtaacagaaattatctataatttcactattatcacacagtgtgtgagggcttgtattttgtaagtgtttttaatttttttctttagtaattcatttttatcatattttacacaagtagtggtcttcatcaaagttgaaataaaaaaattctttgctccagatagttttagaaacactgctataggagacctgacatcaaagccaagttatcaagagacagaagactacatttgttcttactgtcaagtaactgatgaagaactgtctcctcctagtgacaatttcctacaatgagattttttaaatagaagataaatgttctcacttctttttcagggagtctggccaaggaaaagacacagaccttgcacaaatttatactactttttgctgtatttgatgaaggttagtgagtcttaatctgaattttggattcctgaaagaaatcctctgctactattaagaggaggtgattatagaaagatcataaattacattactgttcaggaatgaaggagatggggttaaaaatgaattccaagaaaacaaaacgtaacctcagttccactggcagctatgaggtaagaagatagaggagctggataacggactggcctcatccccctcattaagactgtcaacaaatactttgggctctactttctaaatactttctcttatcttcatctattattaagtgcacaacctttggcaagttatttaacctctctgtgtctcggtttcctaaatggaaataatagtacatttttcataagattgttgtgagtgctgagtgatttcacttaagtaacctagagcactgtgtggcatagagtaggccctcaatagtgttagtacctccgcctcttcctcctcctcctaatgtaatcactatgtaatcatagtaacataatattcttcttgcccccttatcaatttacattgccatcttcttaattgaggccctcatgatctgtctcataactctcaaaggaagcttactgaagtgagtatctgatcttgtcactctagcctctacaatacttcagtttgccagtttcggtggctcatgcctgtaatcccagcactttaggaggctgaggtgggcagattgcttgagcccaggagtttgagaccagcctgggcaacagggcgaaaccacatctctacaaaagaattaaaaaatcagccggtcatggtggcgggtacctgtactccagctacttgggaggctgaggtgggaggatcacttgagcccaggaggtgaaggttgcagtgagctgtgattgcgccactgcactccagcctgggtgataaagccagaccctatctcaaacaacaaaacaaataaaataattcaatttcaaggtaaagtgcaaaatgcattatctattctctggtgacatttccagccttgttgtgttccatttcctgccttatcttccatgtcacccaaatatgtaatgctttttcttgcatgagacctctgcatatgcagtttcctctgcctggaaaaatctgtctccctctttacactaagtaagcttctcctttttctttaagtctgacttacttcagttatccccttccttaattccttctcccaggatgacctctagtctggattagatgcctgcttatatttccacagcatcttgagcttattccttatcatactatatcagtattttctactttatttaatatttatcttctttgatctcatatctttttcccttcaagcaaagtgaaatttcttctcctctctgctccctgtaacaccctactctcatctttattatatcactctttactctttattataattatcagcttctctgacgattccagctagagtgtaagcatcttgaaagcagaggctgtatcttcctctctatcatcagtgtctacaattagtagtgctcaataaatatgtgtttgaatgaatgaacaaatgaatggctgcctcataaagttttagcactagctaccagtccttcacacaaaggggtaactccagggagtcactgttcaatagtatttccagtgcttcagcccttatcaatttcagagacagtgttagggagctttcaggttcctggggtttcataaatataagctgggatgaagcaattataacggagacagggactgacagacagcctttttcctaggacaattttcttttttcttttcttttttttttgagatcgagtctcactctgttgcccaggttggagtgcagtggcacaatcttggctcactgcaacgtccacctcccaggttcaagtgattctcctgcctcagcctcctgagtagctgagattacaggcacatgccaccatgcccgcctaatttgtgtatttttagtggggatagggtttcaccatgttggccaggctactctcaaacgcctgacctgaagtgatccacctgcctcagcctcccagagtgctacgattacaggtgtgagccaccgcgcccggcccctaggatgattttcataagctttcttttaaataattcagctaataaaaagaattgaatcctgatgcctcaagctaaccaatattctgtcttctattattatccattcccacttattgtcatggacaaatggagggagagaaaatcagtttgagcaagagatgtctgcctttacataattatcttctccctccctcacactgactttgagaggataagtgctgtgtgcctactttgctgacaaaaatgcttaaggtgtgagcacactgggagcagggaaggagaaaggggaggcggtcattcatgagacacatgcttagctgactctatctttgccttctctctcatcagggaaaagttggcactcagaaacaaagaactccttgatgcaggatagggatgctgcatctgctcgggcctggcctaaaatgcacacagtcaatggttatgtaaacaggtctctgccaggtatgtacacacctgctcaacaatcctcagggtcttccaaattcagcaccagagttctgtacttcagttcacaaacagctcggcatctcagaggatatagcccactgaatacttgaagatctctggcctctggggatcttaatgtatagtaggcaattcctcttttggtcacctgaaaatgaaggcttacccatgtacatacagcccacagtcagatttttctttccttttcttaaatgtgagtgggcaaccaaggatgaacagacatttaaaaagaacctaaaatatggaagggatatgcaaagatgaacaaagaaaataataatcccagaataaaaaaagctatggctcagaacagaactcatcggaagctcttacttctattttcataaagattcaagaagatactgcatcaataaagtaacaataagatgccttccagttttaaaataggggcatagaggcaggctggctttactccctctcacagaaaaccaaaaccaaacatacagcaccaatatctacaccaacaacaacccagagctcacatgtgaggatgagacagttcccggagccacagagaagtgaaaaaactttgagaatcagacttccacatccatgactctccttcctcctattctgcccagcaccaagtgtatggaaaatctcccctcaactcatggtttctacactggaaaaagtgacattgaggtgttcaaccagcttctccaccttcttgggttccctggggggagatttgtccttgccttaacccacagaaaacatcatgactgtctgaaggcagaaatatcccagagtacaggcagagacaaatgagggaggaaggactaccatccccagccctggaaattctgctctataatttggccaaagacatgcaaattcagaatggccgtgcagcagcaccatgctgtagcaggtttatcctacaggtcaccttggcatgaatcactagctggccttccaacactgctatgataatccctttgggacctcacccacttgggacaggcagggctctgaccacttactggaacacctgtaatcccagcacttgagctcagcacaataacaataggagatggctactaccgttaattttatgcagttacgatttaatactggatctttacgtttgtttacatttgtcccaactggcaccttcatcacctccaccctccccaccccagactatggtaaccacgattctactctctattttcacaagatccactcttttagctcccacatgtgagtgagaacatgtggtattgccctgcagtgtcacctatgttgatgcaaatgaaaatattcttttttatggccaaatagtattccattatgtatatataccactgaactgtacacttaaaaatggtaatgatggcaaattacatatgtatattttacatcaataaaaagaaacttaaaaataaggtaacaataggattctatgaaaaacaatcataacaaaacgtgctcataaaaattataaacacaatggtcaaaatagaaactcaatagaaagtactaagaatagataaaatctttcataaggtcaaacaaaatgtggttgagaatatagttgacccttgaacaatgtgggggttggggtactaaccccctgcacagtcaaaaatccatgtataacttttgactccctccaaattcaagtactaatgacctattgttgatcagaagccttatcaataacataaacaacaaatattttgtgtatgtattatatgctgtatattttcaataaagtaagctagagaaaggaaaatgttatttatacttttctctgcttcttgggagtacttccagcatcactagtggcactttatacgggtcccaagtatccttcaaagtttatggagagatgaaatgcttatgcagagatgattagcatcatgcagagttttcagtggatgcctgcagcactcgagctcagcacaataacaataggagatggctactaccgttaattttatgcagttgcgatttaatactggatctttacgtttgtttacatttgtcccaactgggaatggtgccatgtatggttgtaagtatgtaagtttttataaatttcaactttttataatagatttttgtatattttatggtaataaatgataaaatagtctagtatcaacatgtatatgtatatataagtgtgtatacatatatatatatattttttttttttttttttttgagacggagtcttgctgtcgcccaggctggagtgcagtggcgcaatctcagctcactgcaggctctgccccccggggttcacgccattctcctgcctcagcctcccgagtagctgggactacaggcgcccgccacctcgactggctaattttttgtatttttagtagagacggggtttcattgtgttagccaggatggtctcgatctcctgacctcgtgatccacccgccttggcctcccaaagtatatatatatattttttgagacggagtcttgttctgtcacccaggctggagtgcagtggcacaatctgagctcactgcaacttccccctcttgggttcaagcgattctcctgccccagcctcccaagtagctgggattacaggcatgtgccaccacgcccacctaatttttgtagttttagtagagatggggtttcaccatgtttgccaggccggtcttgaactcctgacctcgtgatctgcccgccttggcctcccaaagtgctgggattataagtgtgagccactgcatccggccatctccatatattttttgcattcataacatacctttttcttaatttttttgatatttttaccctatgtggtccatctgacagttttttcaaattgtcataaatttccaaaaaaatctcactatatttattgaaaaaaaactgcatataagtggactcatgcagttcaaacctgtattgttcaagagtcaactgtgtgttttaaagcagattttaacatcaagaaatgatagaaaaatgataagaattaaaagagataaatattcatattagaattgcccatcaggagcttctgagtagctgaacgcatggaggttcctggagagtggctggccccatgccccttcccacatacccttccttatatatgcatctcttccatctggcgtttataagaaaaggtgctgactgctgaattataaggacactgtggtctactagataaaggttgaggagaggggtttgggcttctattgtcttctttccgggccttcatctcctgcttgtgattaagtagtgcatgctgagtggagcaaagtggtggaataggactcttcagcaataatctcctcacagaaacatcaaggtaacaactcgatgcgtgaaattaccttcagaagagttaagaaaacctgaacccatgagcaagactgtgaagcccttttggactgcaaagacgagtaaaaccatagttgcacataaaggggattggttctttatgactgagaccccacccgcaagccactgcagtaccacaggcggaaagtcaccatggacccacggtttttacaccggaaaactctcccgtatggcctgagtgccctctgtggatctccactaattagtagcagagccagcatgagacttgcgtctaacctgggctcagggcgccctctcgtgctaaaaggaaatacaacagccagtcctttcactttctttttgatatggtctctgttgcctaggttggagtgcagtggtgcgatcatagattactgcagtcttgaactcctggctgggctcacacggtcttcccacctcagcctccagagtgggactacaggtgtgtgccactatgcctggctaaattttcgggttttgtgtgtggggtggggaagattggggtattgctatgttgctcaggctgggtctcgaactcctgacctaaagcaatcctccagcctcagcctcctaaagtgctaggttacaagtatgagccaccacactcagccccactcaatttctaaacgagctcactgaaatagagcagtcacaaacaaacccagactgtgaacatgagaataaatacctaattcttcaatgtgtagacagggatgcacatctgcaaagaataagaatagcctaagaaagacagcctcaacaaatgaacaaaaaatcgtgccagtgactaatcctaaagacatgcaggtgaatgatctggtagacaaagaattcaaaatagctattttaagaaaactcaacaaacttttataaaacacagagaaacaattcagaagtttatcaaagaaatttaacagagaaattgaaggaataaaaaaagtcagaaatcctggaactgaaaagtataataaaaaatgacacatgcaatacaagacatcagcaacagaattgatcaggcagaagaaaggatcagcaagctcaaagacaggttatccaaaaatacaatcaggaggggcttcaggatggttgactagatgcatctagtgttcatcccttccatggagaggaaccaaagtagcaagtagataattatactttgaataggtcatctaagagagaacactggaattcaacagagcagtgacaggaagcattgaaagcaagggaggagagagaaataaggcctgtttgcctgggattggctgggagtctggaacagcttcctaatgtggggaaaaggtaagagacccttagtgttcctcattttcaccaaggactcttgcaatcctagccacaggagagcgccttattccttgacagcacagagactagcatagggagttgcctaaagaccgtgtgaaggcattgcaacagagagctcacgctggattctgcaattctcccaagcagctgcagcacagcaccattttgagaacacagcccacacatcctgccctgctatgatggccgtgacttaggcaggagccctgagcagtgatcctgccccacccagcagaggagtgcccatgcattttcacatattccaagaacaaattccactacctacaaccactgctgctgcaggctgctgtggggccaaaacactagtgaaccttgtgctcccaagctacctgcctacagctactccctgagaaagcaaccccaccttcaccaagagcagggctatagcacagctactgctgcaccccaacctgagcattttgctagtgacctcggtatcaccccacccctgcatagcacaaccagcacctcacacaccaccaaggagcctgagggcaggttcacgtagcccagctctacctgcccccagtacccaagcatatcatccaggggcctagggatcacttagccctgtccaccactggtggcacctgagcacctcctggggtctgaggtcaggcccactcaacctgccactactgccacagttagcactcactgcatgcaccacttgagggtctggagactggccatgcgatccatagcagccacaaccaacgccagcacagaccacttgagattcaggttgtttcattgctatgattgccatcaaccatgccactttgctgcccaggaacttgagaacccacccacccatgtgatccatcaataccacttctggcacccaagtaaaccacttggaggcccacaaatcaacctgcctggacctaaaaccagtgcaatcatatgccaccatggtacaccaaagacaagcacactcagcccactgctgccaccattggggcctgaagacaggcctacctggcatcccacttctcagaaaaacttcaccacagcctccactaataaccacaccctaagccactgagaaaatcacaaatatcactgatgctgtttagaatcttatacagaggctactacattcaccgagaatcaaaaccgaagtgctctacccaagcaacaccacagatacatcttcaggaaaaagttctttcctacaaaagcaaattttaaaaattggaaaaagtgattattacaccagatgtgcagatatcaatgtaaggacacaggaaacatgaaaaatcaaggaactatgacactccaaaggagcacaataattctgtagcaagagatccaaataaaaaaaatttaagatgggtacaaaaaaatagaaagaatgaataagacctgctatttgatagcacaacatggtgactatagttaataataacttaattgtacattctaaaataaagagtgtaattggattgttaataactcaaaggataagtgcttgagggtatacatacctcattctccatgatgtgtttgtttcacatcacatgcctgtatcaaaacatctcatgtgttccataaatatatacacctactatgtatccacaaaataaaaaaatcatagtttacaagcaaaacagtatatgtgaccattggtttttaagtaaactggccaacatctctttaaaaatttatgaaatcctggaaaaataattccaaattttgatactaaataaactcagtgagatacaagagaattctgaaaaaaatacaaagaacacagaaaaacaattgaggctatgaaagagaaatttacccaagagatagatatcaaaaaagaaccaaacaaaaattctggaaccaaagaattcattgaatgaaatacaaaatagatttgaaaggttcaacaatagaccggaccaagcagaagagtatcagaactgaaatacagatcttttgaaataacccaatcagacaaaaataaagaaaaaagaattttaaaaaatgagcaaagatttcatgacatattaggcactataaagtgaccaaatatttgaatcttcagtgtcccagaaggcaaagagaaaatgaagaggttagaaagcctatttaatgaaatattagatgaaaaatttccaagtctaccaagagatttagacatctagataaagaaggctcaaaaatacccaaataaatacaatgcaaaaaggtcttctccagggcacattatagtcaaactatcaaaagtcaaagaaaaaaatttaaaaatagcaagagaaaagcatatagtcacctgtaaaggagccgctatcagactaactgtgaatttctcagcagaaactttacaagccaggagagaatgagagagagagaaaaaaaaaaaaaaacacctgccagccaaggatactgtacacagcaaaattatccttcataaatgaaagagagagaaaaatattttcagacaaaaaaaaactgaggaaattcattgcaacctgatctgctttacaggaaatgctaaagggagtttttcaaactgaaagaaaaaggtcctaatgtgtaacatgaaaacatctgaaggtataaaacccacaggtaaaagtaagtatcccgacaaattcagaattctctaacatggtaattgtagaacataaatcacttatatccttagtaggaagattaaaaaacaaaacagataaaaataattaccataacctgttaaagaataagcaatataaaaagatgtaaatgatgacatcaaaaacacaaaatttgggagtcgattttttaaaaaattttcttgcaatcaaaattaagttgttatcagttcaaactaacttgttataactataaggtattctgtgtaagcctcatggtaattacaaagcaaaaatttttataatagatacactaaaaataaaaagcaagggattaaaacatactgatagaagaatcacttaaccacaagggaagagattaagagaggaagaaaggaacaaaggatctacacaacaactagaaaacaagtaaaaatatggcactaccaagttcttacctatcaaaaattaccttgaatacaaatgggttaaattctccaactaaaagacatagagtgtttggttttttgttcttgcgatagtttactgagaatgatgatttccaatttcctccatgtccctacaaaggacatgaactcatcattttttatggctgcatagtattccatggtgtatatgtgccacattttcttaatccagtctatcattgttggacatttggaccgcatattctcactcataggtgggaattgaacaatgagatcacatggacacaggaaggggaatatcacactctgggaactgttgtggggtggggggaagggggagggatagcattaggagatatacctaatgctagatgacgagttagtgggtgcagtgcaccagcatggcacatgtatacatatgtaactaacctgcacaatgtgcacatgtaccctaaaacttaaagtataataaaaataaaaataaaaaaatttaaaaaaagacatagggtggctgaatgaatttttttttaaaaaaagatctaactacatactgcctaagagaaagactttacctgtaaggacacacatagactgaaagcgaagggatagaaacagatattccatgcacatgtaaacaaaaagaaagcaggaatagctatacttatatctgataaaatagacttcaagtcaaaaactataaaaagagacaaacagccagacgtggtggctcatgcctgtaatttcagcactttgggaggctgaggcgggtggatcacctgaagtcagaagttcgagaccagcctggccaaatggcgaaactccatctctactaaaaatacaaaaattaaccaagcatggtggcaggcgcctgtagtcccagctactcgggaggctgaggcaggagaatggcatgaacccgggaggcggagcttgcagtgagccgacattgcaccgctgcactccagcctgggcacacagcgagaatctgtcaaaaaaaaattgacaaacaaggccattatataatagtaaagaagttaatacaacaggagaatgtaacaagcataaatatatatacacccaacattggagcacctaaatatattaatgtttgatctttgtattttctagtctcattaaaagtaagggcaaaaactacaattacttttgcaccaacctaatataaagcaaacattaatagaccaagggggaaatgaagacagcaatgaaataatagtagaaaactttaacaccccactttcaccaatggacagatcatccagacaaaatatcaacaaagaaacactggacttgaactgcactgtagaccaaatagagcaaacagacatttacggaacattccatccaacagctacacagttcacattcttctcaactgcacatggaacattctccaggagattatacattaggccacaaagcaagtcttaactaacttttttaaaatgaagtatttttttcctgccaataatggaataaaactataaatcaacaacaggaggaacaactgtacaaatacatggaaattaaagaacatgcccctaaacaaacaatgggtcaatgaagaaattaaaggagaagttaaaaaatttcttgaaacaaatgaaaatggaaacataacatgccaaaacttatgggatacagcaaaagtagtccttaaagaaaagtttatagcaataaatgcctacatcaaaaaaaaatctcaaataaacaacctaatgatgcatctcatggaactagaaaaacaagaacaaacaaaaccccaaattattagaagaaatgaatgaatacagatgagagcacaaataatcaaaatagaaactaaaaaatacaaaagatcagtataatgagttagttagttctttgaaaagataaaaaaaagtcaataaacttttagccagactaagtgataataaagaagaaaaacagaaataaatcagacatgaaaaaggagacattacaactgataacacagaaatacaaagaattataagaaactactatgaacaactataagccaacaaattgaaaagcctagaagaaatggataaattcctggacacatacaacctaccaaggttgaatcaagaaaaaatggaaattttgaacaaatcaacaatgagcaacaagattgaagcaaaaatacaaagtctcccatcaaagaaaagttcagtacccaatggcttcactgctgaattctaccaaacatctaaagaactaataccaattcttcacaaactattcaaaaaattgaaaaggaagaaactcttccaaaattattttaggaggataatgatcattatcctgatcccaaaaccagacaaaagcacaataacaacaaacaactacaggccaatatcctcaacaaaatactagaaatagaattcaacagcacattaaaagatcatttaccatgatcaggtgggatttatcccagtgatgtaaggatggtttaacatatgcaaattaagaatgaaggacaaaaattatattatcattttaatagacacagtaaaggcatttgacaaaattcaatatcccttcatgataaaaactctcaacaaagtatagaaggagcatacctatatgataaacctacaaacaagatgaaactgagtggggaaaagttgaaagcttttcctttaagaactggaataagacaagcatatccaccctcaccacttctattcaacacagtactggaagtcctagccagagcaattaggcaagacatccaaattggaaagaaggaagtcaaattgtccctgtttggccaggctcaatggcttatgcctgtaatcccagaactttgggaggccaaggcgggcagatcacttgatgtccagagttcgagaccagcctggcaatatggtgaaaccccatctctactaaaaatacacacacacacacacacacacacacatgctagccagacatggtggtgcgctcctgtagtcccagctactcgagaggctgaagcaggagaatcactagaaccccagaggcggagcttgtggtgagccaagatcgcaccactgcactgcagcctgggcaacagagtgaaacactgtctcgaaacaaaaacaaaaacaaacaaaacaaattgtccctgtttgcagaagacatgatcttatatatagaaaactgccaaaactacaccaaaaaactgttagagctagtaaatgaatgtagtaaacttgtagtctacaaaatcaacatacaataattgatagcatgtctatatgccaacagtgaacaatctgaaaaagcaatcaagaaagcaatcacgtttacaatagctacaaaaaatgtccagaaataaattaaccaaggaagtgaaagatctctataatgaaaactataaaatattgatgaaagaaattgaataagacacaaataaatggaaagatatttcatgttcatggattgaagaattaatattattaaagccaaagcaatctacagattcaatgcaattcctatcaaaattccaatgtcattcttcacagaaatagaaaaacaatcctaagatttgtgtggaaccacaaaaaatcccaaagagccaaagaagtcttgagcaaaaagaataaacctggaggcatcacactacctgatttcaaattatactacaaagttatagtaaccaaaacagcattgtgttgacataaaaacagacatatagaccaatagaacaaaatagagagcccagaaatacacccaaacatttaaagccaactgattttctacgaagttggcaagaatacatgatgggtaaagaacagtcttttcaataaatggtgctgggaaaactggatatccatatgcaaaagaatgaacctagaccccctatctctcaccacgtatgaaagtcaaataggccaggcacagtggctcatgcctgtaatcccagcactttgggaggccaaggcaggcagatcacttggggtcaggagtttgagaccggcctggccaacatggtgaaaccccgtctttactaaaaatacaaaattagccaggtgtggtggcacacctgtagtcccagcaacttgggaggctgaggcaggagaatcacttgaaccccagaggtggaggctgcagtgagcctagatcgtgctattgcactccagcctgggcaacagagtgagactctgtctcaaaaaaaaaaaaaaaaaaaaaaaaaagaaagacagaaagaaaagaaaagaacaatagattaaggaattaaatttaagacctgaaactctgaaattattagaagaaaacatagtgtaagcatttcatgacatcaatttgggcaagaatttgttagacaagacctcaaaatcatgagtaacaaaagcaaaaataaagaaattggattacatcaaactagaaagcttctgcacagcaaaggaaacaatcaacagagtgaagagacaacctatagaatgggagaaaatatttgcagattatacatctgacaagggattgatatctagaatatataaggaactcaaacaactcaatagcaaaagtccaaataatcctattaaaaatgaacaaaagacctgaatagacatttctccaaaagagacctacaaatggccaacaggtatatgaaaaatgctcaacatcactaaccatcaggaaaattaaaatcaaaactacaatgagatatcacttacccctgttagaatgactattataaaaaagacaaaataacaagtgctagcaaggatgtggagacaaagaaacccttatacactgttggtgggaatataaattagttaagccattagagataatggtatagagatgcctcaaaaattaaaaatagatctatcatattttctagcaatcccactactgggtatataccaaaaagaaatgaaatcagcatgttgaagaaacatctgcatccccatgtttatgacagcattattcacaatagtcaagatataaaatcaacttaaatgcccatcaatggatgaatggataaagaaactgtgatatagatacacaatggaatactattcatccatttaaaaaagatgaaatcctgtcattttcaacaacgtggatgagcctggaggacattatgttaagtgaaataagccaggcagagaaagacaaatactccatgatctcagtcctatgtacaatctttaaaatttgatctcatagtagttgagattagtgattctaggaagataagggggaagtgggagatggggagagattggtcaatgggtacaatgttacaggtagatagaaggaataagttctggtactctattgcacagtagggtgacaatagccaacaataatatattgtatatttcaaatagaagagaggattttgaatggtctcacaacaaagaaatgacaaacatttaaggtgatggatatgataattaccctgatttgaataattacacaatgtatacatgtattgaaacatcacattgtacccataaatttgtagaattatttatgtgtcaataaaaagtaatacagttaaaaaaataaaattgcccattaggataaataaaaagacccacacacaaaattatcattgtggcatttcagagcacagagagaagatacttaaagcttcttctgagaggaacaggacgcatacaaaagaatgggaattagactggcgatataattaagcaatattgtaaaagatctaagggaaaaattatttggaacctagaatttttagtcaaactatgaatcaattttgggggaagaaaaaagacattttcatatatagagggccttaatagtcactgaatgtgtactatagtaaaaccagaaactacataaaagaggaatttgggagattcagcaacccaagagaataatgaagtatgagggggatgttttctccttagttcttttccgtatttttcaataatttgataataaacatgcataattttataattaaaaaggaaattaattttgacaacatgcaagttcctgttctcacataccttatagtggagggacagattgtagtcaaataagcataataatacatgcaaaattacaaactgagcattactctgaaggaaaattacataattctatgtaagcctataatacaggaatctgacctagactggggaatcagagaaggcttccctaagcaagtaccccttgaacttagctttgaaactgggaaaatgaggcaatgtgagatgaagctgttagaggtattaggaatcaaacctattggggccttctagtccttagtagagagtctggactttattctatgtggaatgacagcctccagtgggttttaggctggcggatactacaatcagatctggaatgcagaaatagtacaccagtttctttgtgggtaaaagtcttagaggggagaatatgaccaactgtagggagacctgtaaaaaaagtttatcagtagctcagacgagataatggtaacttggattaagatagtggtagtagtaacagtgaaaaactagatacatttgaaagcttttagagccaaaataggaggcagctgtgcccttgttgttaccagtgtgggatctgaacacatgactacttgggttcaaatactgagcaaattaattaacctctctgggcatccgtttcctctcctgcaagacatggatgataatggtttctacattcatagggttgttatgaggaatgaatgaattaaaacttgtaaaatactttggacagtgcttgacataaaacaagtgctcaatacatattagctattattgattatattgccctggtcagtgtcaaactgcatatgggagatgagaatggtaacaaggataactctcacttgcatattcaaatgcaggatgctgccattcactgttataaaaaactctggaagagaatgaagtgatgaaaattgtaaatttggttttgaacatgtgggttttttgagatatctaggtggagatgttgagaaagtgattggctgtatgagcctggagttccagaagaggtcagcaggggagacagaagaaggagcagtctgagaagtaggagaaaaaaacccacagagatgttggcacagaggccaagggaagagagagttttaaaaacgaatgaatggtcaacaggtgcaaataaagactgaaaaatgtccattggatttagcagcatgatggtgattggtgaccttggcaagagctgttggtttgatagtagcccaatgttcttgataaatttgtttacaagtcaaggtagcaataaagtgtctaaagtcaatttgtccattctgtcctagcaagtgttttccatttcagattctctacttcatagccataggtgtcttattcctactttacaggtctgattggatgccacaggaaatcagtctattggcatgtgattggaatgggcaccactcctgaagtgcactcaatattcctcgaaggtcacacatttcttgtgaggaaccatcgccaggcgtccttggaaatctcgccaataactttccttactgctcaaacactcttgatggaccttggacagtttctactgttttgtcatatctcttcccaccaacatggtaatatcttggatctttaaaatgaatattataaatatccagtcctacttttaataaaatttactggacaatgtacaggaatatagtgtgttgctgaaggggacattatagagttactgtattagacctcagccaagatcccctagtttccagcttccagtgtaaagtttttaccttgactataaaagggcttgagtattagtaggactcatggatttttagttaaatgtctgtgatggagaaaagatggcttatggatgattgaggtgggaaaatgaggagaatagtatgcccttggtttctcagccttatcccattaattacgctccaatattatggagagaggaactgcaagttgtagctgaagagattttttttttttttggagaaatctagggaaatgggaaaaaaaggcattgtccagattgcaactgtaagggctccactatatcattagtaatgcccagagcagtaaatagcaaatatgacaggctattgtagagcttgacttcagacaccagacagccagaggcactctgtagatacctggcagtagatgagagacacctgtgaaactgagggcaggtcaggagctagtgaattttagaagtaacatgggattgaaaggactatttggtgggaactttggaaagggtcaaaggttctgtgtaagcaaattaggacgatggtaactacagttttaaattattgttaatgtaactttatttgtaactgctagttgtgcaaattcagattgcatcatcatttcaccccaattttccttacttttgtatttattctgctaactcttaatcttggatcaacctaataaccctctttctctacccctctcgtggccattgaaggctcttagtcagtttgtgctgcaataacagtataccacagaatgggtaatttataatggacagaaatttattggctcacatttctgggggctgggaggtccaatatcaagttgcctttttctgcgtcttaacatggtggaaggcattatatgacaaaagggcaaagaaagggtgagagagagcaagaggagggtgagctcactcctgtgataacaaatccactcccatgaacactttccccagataactgcattagtccattcatgagggtggaacgcttatgacctaaacaccttttatatgttcacctctcaataccatcacgatgataattaaatttcaatatgagtttcggaggggacagacattcaaaccatagcaagagttattggagaaaaatgtcggagaggcctaatcttttatatttaatagcatttctttcttcctattactctcatattaaccttctcctcaggttccttggttgacttagaaaagagaattgatcttgccatgcatccaccattttcctccttatgttctattagtgaccttgtttattgtcttctgtagtgattaagaatagaaatctctcttccccatgtgtcacataatatttatggaattttgacaagaccttagtggacaaaatgtgtcatactgaatgagtaacaggaagttgatgcacaaacaacattcttgcaggcacagaggaataggtcatttacttgtatatgatcattgtcaatcaatcattgtccagttggaccccgattcagtttattttttgttttgtttttctccttttcacagattctatccactaattttaatctttatttttcagaaaaaaatgctttatcttattgaacctcagaccaaacactttgtttttcgatgcagactgagttatgtttaaggctacatgaaccccagactagttgtttgctgctcctaaaaccttccctgttcctcataatcaagtaaacaggtctcccttcttagaagtatttgatcttcaaaattgccctgtggtataaatagggcaggaattattattatccattttacaaagcatgaagatgagactgagaatgttgaatacatttgccatagggtttacaactagtcacaggcagacatgctcttaaaatatatatctccttgattttaagttgtatcttgtcatggttttatgaacttggaacatgtcttaaagtttatatctacactaacatttttcccaataagctgttattaaatcaatgatttgtggcaagaagggatagtgatgtggaaagggggggtacttaggggagagcctggaaggcctaataagagagaaagaagtcataaaagttaaggcaagtgatatggtttggatatttatcttcactgaaatctcatgttgaattgtaatttccaatgctggaggtggggtctggtggcagatgtttggatcatgggggtgaatccctcatggcttgatgctgtcttcatgatatttggtcattcagaagtgtgtggcaacttgcactctctgtcttgctcctgctttcaccatgtgacatgtctcctcccccttcacctacccccatgattgtaagcttcctgagacctccctgaagccaagcagatgccagcaccatgcttcccatatagcctgcagaaacatgagccaattcaatctcttttctttataaattacctagtctctggtatagaacagcctaatatagcaagacactctgacattgtttggtttgtctgactccagatggcatggaagcttatgtcaaagtagacagctgtccagaggaaccccaactacgaatgaaaaataatgaagaagcggaagactatgatgatgatcttactgattctgaaatggatgtggtcaggtttgatgatgacaactctccttcctttatccaaattcgctcagttgccaagaagcatcctaaaacttgggtacattacattgctgctgaagaggaggactgggactatgctcccttagtcctcgcccccgatgacaggtaagcactttttgactattggtactctctcttccccatactcaaaaagttcttaccagttattcaaaccaacaaatcctgaagccatgtttaaggttaggtacaggtatggaatcaaatggcaagggtattaacatttggaaactaacatagctgagcatcagagaagcttgtatttttctcactccttgccttgattgaatcatataagctgttttagagttggatttgagcctacctagaatttttcttcccaacctctcatctttttttctcttatacagaagttataaaagtcaatatttgaacaatggccctcagcggattggtaggaagtacaaaaaagtccgatttatggcatacacagatgaaacctttaagactcgtgaagctattcagcatgaatcaggaatcttgggacctttactttatggggaagttggagacacactgttggtaagttgaagaaaagatttaaggtcaggtaagaagaaaaagtctggagagttttgagtttctaaaatacctcataattcagccttgtctccaatggacatgatcttttaaaagctataaatgttacacaaataatagctgattgtatgtatttaaagtttgagtatatagaataaaaatttaatgtcacccactaaactcgacactcctttgaaatactgcttagactttgatacatatccttccagatctttctccattaattatgtcatataggagtcagcagactatggcctgtgaaccaaatttggcttgtggcctgcttttgaacagtccatgagcttagatgagattttacatttttaaaatattgcaaagaaaagaaaggaggatgggaggaaggggaggagaaggcggaggagcaagagaatatgtgacagaggctagatagggctcacaaattttagagtacttactatccagccttttccaaaaaatgcttgcttgctcctgatctaggatattaagaatgagtatggtgtaagtaacagaatactcaatggacagtggtttaaataaataagggtttattttcttcacaagaaatttgaagattggtcgttggttccataaattcagccgctgaagaatgtcatgaagaacactggtttttagatatggagttttgttagatactgccaaactgactttcagcaattttgtaccaatttatatcccctaccataagtatatgactgcccttttccccacaccattgccaacaacatatattataaaccttcagaaaattttccaatttgatgagcaaaatgtttatatgttgtcttcatttgcatttccctggttagtggtcaaattgtatattgtttcatgtttgttggctatttgtataactccctctgtgaattgcctgcttgtaaattttgtccagttttctatttggtcagtcatcttttgcttatgtatttgtaaaaggtctttatagattatggatattgacacattgttatttatctttcaaatgttttcctcacattgtcacttgtactttaactcctttatgatattttttgtccttcaaagatttttcatctttatatagtcaaaacctcctatcttttatcaatcttttcatttatatgtctctggatctttttcacttatgttttctgcctgagaatgtctttgccacccccaagacactacaaaaatagtctatattttattctcttacttgtatagctttatttttacagtgagcaatctaattgccctggaagttacttttgaatgtagtgcataattcaaatagaaattttcccaaatggcagctgacacaaccaatccttttttcattaatttgaaaatgtcttctttatcatatactaaattgctaaaatctgggatttttaattctccttaactaatctgttaccaccctgttttaatgacttcaactttgtgatatgtttgatatctgtatgacatcttctttcattgtacttcttcaaaatttttattagctattattgtacaatttttcttcataaattttgtgtacgtattttttctatttttcattttttgaagattgtataattttattttttattcattaatttttaaaatgcataatgacacaataattttacatatttatagggtactttttgtgtattttgagttacttttactggctaatttaaaaatagataaacaagagcatgcaataaaatgtaaattttcctccctcttggacttccaaccccatagtctgacagacagtcattgctgtgggtttgtatactcccctccagaagtagtgcatacatgtacaaatgtgtgtgtgtatgtgtgtgtgtgtgtgcatttcacacaaaaacaagagcagtgtaaattggtctgtaccttgatttttaaaaggtaacaatatattttgaattagccaggcatggtggcacatgcctgtagtcccagctactctggaggctgaggcaggagaatcgctcgaatctgggaggcggaggttgcagtgagctgagatcgcaccactgcactccaccctgggcaacagagtgagactctgtctcaaaaaaaaaaaaagtaacaatatattttggatatcatttcatgtcaacatatatagatctaccccattctttgatttattcaggttatactctggataccatgctgaatcctacacttaaacattacctcaaaatggatcaaagataaaatgtaagagctaaaactacaaaattataagaaaacaacaggataaatctttgtgatcttgaattagacaatagtttattggataggacaccaaaaccaacaagcaacaaaagaaaaaccatttgacccagccatcccattactaggtatatacccaaaggaatataaatcatgctgctataaagacacatgcacacgtatgtttattgcggcactactcacaatagcaaagacttggaaccaacccaaatatccaacaatgatagactgattaagaaaatgtggcacatatacaccatggaatactatgcagccataaaaaatgtccccgtttgcagatgacatgattgtatatctagaaaacaccattgtctcagcccaaaatctccttaagctgataagcaacttcagcaaagtctcaggatacaaaatcaatgtgcaaaaatcacaaacattcttatacaccaataacagacagagagccaaatcatgagtgaactcccattcacaattgcttcaaagagaataaaatacctaggaatccaacttacaagggatatgaaggacctcttcaaggagacctacaaaccactgctcaacgaaataaaagaggacacaaacaaatggaagaacattccatgctcatggataggaagaatgactgggttttaagacaagagcagaagtggaagttgcatttttatcctcatatcacacacctcagatctggaggtgggattgatattttcagggttcttcgctgcagcttccatgttattgctcttccattctctctctctctctctctctctctctcgtctctgtctctctctctctctcttgagatagggtctcattctgtcacccaggctggagtgctgtggtgtgatcacagctcactactgcagcctcaacttcctgggctgaagtgatcctcccacctcagcctcccaagtagctggtactataggcatgcaccaccacgcctagctaatttttttattttttgtagagatgaggtctcactgtgttacccaggctggtcttgaagtcctgggctcaaacgatcctcctgcctcagcctcccaaagtgctggcatgagccactgcacctaggcctttgttttcttttaaagctggtgcaatcaggcaataccacctgctacccttgcttaatactgtaatcaactgtcctcttggtcatgcctgctcatgcactgaagattttatctcctgaaacactgtctctttctctattatcagtgaatttaatgcccaaatagtaataaaggctgagaggaagcagtgtcctcaccaggcatctaaatttcaattagtgtgagaaggtgcagagaatacttcctgaagcaattgaaacaatttttaaagaagtggaaaggggcctttagagagaaacctaagtactgtcagccctctacattgtcaactgaagaatcctaagtttgtaaatttggagtggaaagggttgcaggctgggaagtgtagcctctggcagcaaatggaagcaagcactttgaagaaggaaggatgagataagaatttatgctgaatgagttggctaagtatacatatttaacaggttccaggaggagctgtgaatatttatgatggggcacctgcaaccacacatgttacatacattccatgttcactttggggtggagacttaacatttagatgcatgaaaattaggctgtatatgtcaaaagatgaaacagaggacacagaggcagcctctgtaaactggccagagccagtccatggtcagtggtctctcatcaggaagcaatgcttctcggttgttatgataaaactgcacaaagggaggggaatccaccacgtctttagaaaggactggtttatgtttaacccttaagaaagaaagtctaacggcagattagggagggagggaatgtaacaaggcatgcccgatctcccatcccatcatggtcagaaactcagtttttaagccatctctggggtctccttggccgagaaaggggtctcttcagtcgtttggggatgcttaagattttatttttatttttcagtatcactggatttctagtctcatattcaaacaaccattgattgaaagtattcaaaaaacaaccccaaaacaataaaagataataatacaacaataaacaataatacaaagaaacaatacggtaaaacaactatttacatagcatttatgttatattatgtactgtaagaaatctagagacgagttaaagtacatgagaggatgtgcatatgttatatgcaaatactacatcattttgagtaagagacttgagcatcacagattgtggtatctgcaggggtcctggaaccaatcctccatgcatgccaaggaacaatttcatgaaaagaccaaatattttgagttttatctagcctcaaattactataatgtagatagaggccacttttatttatctggagttagaccacagttttcttgttgatcctagtcgttttaggatttgatcttagatctcgcttatactttcagattatatttaagaatcaagcaagcagaccatataacatctaccctcacggaatcactgatgtccgtcctttgtattcaaggagattaccaaaaggtaaatattccctcgatttatagctcttttttacctgtagatacagatgagataaatatcatcaataacaactaaaattatgttggtcctttctccagctgttggccggacctcaagctccagtctaaagttataaaaatcaattataggaatcctcaggtgatgtttcatgtaaattcgtgaagagtcgcctgacatgtttttcctattacctagcggtgatgttcaaatattccacagccaattagattccactgcaattggttccactgcaactactgtaaatgccctaaaatcttgaagctggttcttctggcacttaagataatttttttttctgagtacggttttcagctacattccacacttttggtatctagtgtggtattccacactttgggtaactagtttgatattttcaggattctttgctgcagcttccatgttattgctcttccttgctctctctctctctctctctcaacagggtttcactctcacttttggtatctagtttgatattttcagggttcttcgcatattcatttctaaatagttcacaactccagtttttatttactatattgtttgctgtttaaagatttattttttcttttagtagattggatgttatgtatattctttctattatttaattttggatgaatatttatcaaaataatagatgtgtatgcttaaaactacaaaagggctgcctccctagaggcatccatttttaagaatttctgtttttgatttttggtggttatctctacatctctaaaaagttacttatactgctaactctttgtttttcaactttagacattatatacttactttgttttgtgcttttttccattcaagttgtttcagttttatcagtgttttcagttggattggctatcattagaactttaaaaatatactaaacatcaacttttagtaagatattttccaatcatggattgaaaatatcttttgactccatacttcataaattaaggatattaaaaactgtacccctcacttttcctttccccaaacctttcttttctctactgctgctagccattcctttacttttacaaaactaaacttgataacatttacattttgtgctgtaatttgaaataactcttccttgctttgtctatatattttctctaaagcttaaaaaattaaaaaacagcatttgtattattttagtattttagcaagtttcttttcataaatgttaactgcagaactgggtaatatgctatgattgctctcttttctacagctcaagtgattttactattaagataaaataatatgtggaaggaaaaaagttgatctcatagaagtagagataaaatagtggttactagaggctaaagaggggaaggggagggggaaatagggagacgttggttaatggatgcaaaattccagctagataggaggcataagtcctaatgttctatagcactgtagggtgactgtagtcaacaatgacatctattttcaaatagctagatgagaggatttggaatgttcccaacacaaaggtgtatcctgaagtaagactttgttttcttttattcggaaaagaaatgtaggcttcttcaaccctatttcttaggcctttcagcttcttaatcattctatgtattgcttgctatccaaatcttttattttttttttgagacagcgtctcgctctgtcacccaggctggagtacagtggcacgatcttggctcactgcaacctctgcctcccaggctcaggctatcctcccacttcagcctcctgagtagttgggaccacagacgcacactaccatgcccagctaattttttttattatttttattttttgtagaaatggggtgttaacttgttgcccagactggtgtcgaactcctgagctcaagcgatctgcctgcctcagcctcccaaagtgctggaaccaaatctttttcttcttaaagacattcttgtagtgaatagcattaactacttttcccttgtacatttctattttttgatttcttcttttgtttttctggaagtatattctcaagtaacttctaaatatgtggtacatagagggtgaactttctgaatccttcagtatcacatgatgggcagacagactggttataaaaattttcccgctgggtgcggtggctcacgcctgtaatcccagcactttgggaggccgaggcgggcagatcacttgaggtcaggagttcaagaccagcttggccaacatggtgaaaacccatctctactaaaaatacaaaaaaaatagccgggcattgtggcgtgtgcctgtaatcccagctactcaggaggctgaggcaggagaattgcttgaaactgggaggtgaaggttgcagtgagccaagatcaccccactgcactccagcctgggcaacagagcaagactgcatctcaaaaaaaattccttcccctgttttctaatattcattattgccgataagaattctttatttgcatttctttatggaagaatggcatagtgacagagttctggggagattttgaatgtgtgtcccgaaatttggaggcatacgtggatagttactggtaacctgcttttccatggagaattttgaaggctgtaatgcccataatagtgggcaagaagagagggcaagagtggagcagtttaccttcctgctgtttgacatgagtttattctgtaacaagtgaatactgttgaaagtagctgggctttatcccttttgaagatattctacccaagaaggcagttaggcaggctgaggggatagcagaaccaatagagtcttggatatatcactggaagtaagaagagctgatggggagaggagagttgcagaaggatagctgaaagaaacatctctcatgtcatggaactatgtaatgctgaggtccccatggtaactctaaagaaaccatacatgtgtcctatgaaaagaccagcatttgggcacctcccacacagagaacattgatgaccaaatagtgttgtcaaagatagagcagcaggacctgttaaacaagagtctgtttgccctttcttctattacctaccctccctcacccccagctcctggaaaagggaagagaaggctcagaaatattgaaagaacatactacaccattccctttctttctttctttcttttttttttttttttggagacagagtctcgctctatcccccaggctggagtgcattggcatgatatcggctcaacctctgcctcccaggttcaagcaattctcatgcctcagcctcccaagtagctgggattacaagtgcctgccaccacacctggctaatttttgtatttttagtagagatggcgtttcaccatgttgaccaggctggtctcgaactcctcacctcaacaccattccctttctatggatcctctaaccataggtcaggcataacttactgaggtgaggaagagcttagaatgaatataaaattaaaattttgatttagattgtatcttcaggtatgaaacatacccagaatgagacttaattactaaaatcagttcttgtcctgaggacccattaccctgagggcagatctcagttcttgctccctttcctcacagaagtcagagactacaccttaaaactccaatgccaagctctttggcatatattcaggcctgacactttcacagtcaaccggataatcaattacagctttttactttttaaaaaaattgtttgaatcttaaaattataataggtgcgactttagcttccacttgctcagaaacttcatatgtacatacagatttgtagaacccttgcaacaacaacatgattatcaatatgtggcttgttgtactctaattgagctatttatggttttgcttgtgggtaggtgtaaaacatttgaaggattttccaattctgccaggagaaatattcaaatataaatggacagtgactgtagaagatgggccaactaaatcagatcctcggtgcctgacccgctattactctagtttcgttaatatggagagagatctagcttcaggactcattggccctctcctcatctgctacaaagaatctgtagatcaaagaggaaaccaggtgagttcttgcctttccaagtgctgggtttcattctcagtgtatgtccccttataacctgaagaaaatataatggtttgcaatataggtcagtaaaagaaatgagcttagcttttactaaatttgagtttcacgtagtaaacgtgcctgctggatggataggccatagaatgtaggccctagatttttcctatagtactcattcccagtctgggatttagctctctctagctgatcctccccatttttatatgtccaattaccacctattttcagatgacccacagatttatatctacagcctagatttcttccatggacatctcattatgggtgactcaaaagtacctcaaaattaacatgtctgcagcatgtagcactgttgcaggaagtcagggaccccgaacagagggactggctgaagccacggcagaagaacataaattgtgaagatttcgtggacatttattagttccccaaattaatacttttataatttcttacgcctgtctttactgcgatctctgaacataaattgtgaagatttcatggacatttatcacttccccaaccaatactcttataatttcctatgcctgtctttactttaatctcttaatcctgtcatcttcataagctgaggatgtatgttgcctcaagaccctgtgatgattgcgttatctgcacaaattgtttgtaaagcttgtgtgtttgaacaatatgaaatctgggcaccttgaaaagaacaggataacagcgatttccagggaacaagggagataaccataaagtctgactgcctgcagggccaggcagaacagagtcatatttctcttcttgcaaaagcgaataggagaaatatcactgaattctttttctcagcaaggaacagccctgggaaaagaatgcattcccagggggaggcctctaaaatggccgctctgggagtgtttatcttatgcagttgaagataagggataaaatatgccctggtctcctgcagtgcccccaggcttgctaggattaggaaattccagcctggtgaattctagtcagaccagttctctgctcttgaaccctgtttcctgttaagatgtttatcaatgacaatgcatgcacagcaggacatggaacctcattagtaattctaatttcgccctaccttgtgatcttgctctgtccctatttgccttgtgatattttattgcctttgaatcatgtgatctttgtgacccacaccctattcgtacactccctcccctttgaaaatcactaataaaaacttgctggttttgcggcttgggggcatcacagaacctgccgacatgtgatgtcacccctggagacccagctgtaaaatttctctcttttgtactctttctctttatttcccagaccggccgacacttaggtaaaatagaaaagaacctatgttgaaatattgggggctagttcccacaatatagcacagtgcatctcacttagtaagagcttaataggctacgtgcggtggctcacgcctgtaatctcagcactttgggaggccgagacaggaggattgcttgagctcaggatttcaagaccatcctgggcaaaatagtaagaccttgtctacaaaaaaaaaaaaaaaaaaaaaaaattagctgggcatggtggtgtgtgcctgtagtcccacctactcaggaggctgaggtgggaagatagcttgagcccaggaggtcgaggctgcagtgagcctggatgacaaagcgacaccctgtctcaaaaaaaaaaaaaaaaaaaaaaaaaaaagcttaataaatacttttgggcaaaacatagggaaagatataaaatatttcaaaatatggctagaatttggaccatttctactgctttaaaaaataaagctaaattctctgaacaagaaaagcttagttcttcacaaaaactcattgctcggccccagaataactcagtgccatattgctgaggcttgactacatgtccatttgattatatttatgatacataagatccctactagtctgaaaacatttcatatgtttagagagtaaagtatatgaactttggtgccaataaaacacatggcacataaactcagagaagtataaattttgccaagtacttgtcctgaccgatttttcctaactatagttttttcgtcacttttgggaagagaactgaaatattattctatattctccaatctcctctcttcagtattttggtttatatagctataggttataaaaaatgaggtttatacatattagtgaggtttacatatgaaatcttagcagatccaattagcaagcgactaattcataaatctggttcatatacaaaatgctcttctgaaaaaaatttgaatgttttaaacagaaaatttaaggtattagtgttgtttgacatttttgtggttcaccttatctttcttatttgatttctgtttttctatttttaattttttatagccttgtggaaggtcagttgctagatggaagtttaggaaagtcagtatctcatttgacttaactaacttaagaaaggcactgaataaccacttggttctttaaggagttaaatcttctaatctgaacatgaagagaataaggctacagactgtaccaaataaatcagctagcatatggccttgggtgcagaaaaaactaagttcagtgggatcagtcaccctcttgtcctggggacacatttgttgtaagcatatactcactgctcatagcacccaccctcaactcccaagccctggtacatgcctaagaggaaatggaattaaaccaatggattagatatatcacatgcatgccatcgctttcatcatagactgctagctcctacctgacaacatcagtagcatttctttacccctttcaatatatgtaattaacagataatgtcagacaagaggaatgtcatcctgttttctgtatttgatgagaaccgaagctggtacctcacagagaatatacaacgctttctccccaatccagctggagtgcagcttgaggatccagagttccaagcctccaacatcatgcacagtgagtaaagcagcacttaagtccagtgggtggtgaataaagaaaaattgatgtaatcaaagtgatgtccagataatgaatgaattgtatgtgcacataaatttaacaattatgttacctataaatgtataatttttactcaaacacacgtgatcatataacccatattttaaaaatccagtcaccattttttcctttcaatatttacttgatttccctctcccttttaattccctatctccttctatattacatcttttcaccaaccattccatgcccaggtaacatattttaagacatattttctctataattatataatcatatataaacacatacatacattgtattagtcttctagtgctgccataacaaagtactgcagactgggtggcttaaccagcagatatctattgtcttacaactctggaggcttgagatcaggatgtgggcaacgttggtttcttctgaggcttctctccttgtcttgtagatggctttctcccttgtcttcacatggtttctcctttatatatctttgtcctaatctcctcttctaataaagataccagtattgttgggctagggcccaccgtaatgaccttattttaactaactacctatttaaaaacactatctccaggtatagtcacatgctgaggtactggggtttaggactgcaaggtataaatttgggatgggggaacacaattcagcccattgcatacatacacatgtgtatatatttatatataccacaaatctgaatggtcaaaaatatggtaaaaaattccaattgcactatcctacagggaaatgcgaaatagaataacaataggatagcactttatacccatcaaactgccaaaattataattactagtgggcttgtggataaaagagtgttctcatgctatattagtggataagtagtatagtcttttcaaaaccaatatatgccttttgaaattctgattattaagatgtttaagatggagtgagccacatttccctgtgtgtcccactggatgcaactaaaaatcctgaacaggccgggcacagtggctcacgcctgtaatcccagcactttgggaggccgaggcaggcggatcacgaggtcaggagatcgagaccatcctggctaacatagtgaaaccccgtctctactaaaaatacaaaaaattagccgggcatggtggcggccgcctgtagtcccagctactcaggaggctgaggcaggagaatggcgtgaacccggaaggcggagactgcagtgagccaagatcgtgccactgcactccaggccggcgacagagtgagactccgtttcaaaaaaaaaaaaaaaaaatcctgaacgaaatgcatgggaaccttgaaaagttataatgtgagttatactcacctaccagaatgtggcatatgttacaattctatgcccctcctctcaaagctttagccctttaactttgggttgagcctcatatttagcttgaatttctagtaatagtgatatattattctccagagttaaagtcctttactatccattattctaaaaattttaaggttgtttagtcctttgagttgcatttttattttttacatagttcagggtattgctttccttctgaaggattcagatttcacatttgtgcaagagtctaatgcttagtatttaattctagtggcacagagctttttcttttctccctcttctctccagcctcatggctttggtttagaattccttcagcctgatagaatattgtattttataatttccttattgtgctatttactagatatttgttcttctatttttttctattcataatttctccctttcccaccacatctttttccaagtaggatgtgcacttgccacagtatctggacagttaaactgtctcattttcttggagacggtgatgaaaactagagagatatagtgacataagcagagccagaaaacaatttcactgaagatgatatatattttttttcctctgggatttctaatatagcttttggtggagataagagtctggaattgagaaagaagagattggaattgagaaaaagagtctgagaaagcacagggagagacacaaaggcagagaccaagagacacaggggaaggatcttcagaggaagagtccagggagaaagatgctaagacagagggataagaaaagaagaaaaaaaaggaccaggaggagagagacccaaaccataaatcactcctatttccattagcagtaaaattgataatctattttcatacaatgaaataccatgtgacaatgaagattcacaaaaataaagctatacacaacaatatgaataagtatcacaaagacaatttttagtaaaatggtaagtgtcaaaagaatatatacagtattatattatttacataaagttcaaaaatgggcaaaattaacttatatagtttagggatacagaggaagaaaagtataaaggttagtaaggacatgattataataaaagacaagatagtggctacctcttagaaagagttcatttgagaataaacacatgtgttttgtggggatagcagcaatattgtatttcatgacctagatgtttgttttataattttgtgttttaaaaaattgtaggatttatgatttatttcgtagatggatcctacaaatgatagggaaattgcagtaggaatgaagaggaaggaacatgtacaggatttgtttagaagatagaaggcacatgattttgtaaataattagctatgtttggtaaaggactaagaggattcaaagatgattaccaaatttctgatatgggtaactagaagaagagtgagacaaaatggaagaaagtgtatttaaagaaatgatagcaaaaactttccaaatctggagaaagatgtaaatatccacgtacaagaagctcaaagatctctagtcagattagattcaaacaagactatatgaagacacgttacaatcaaactgtcaaatatcaaagacaaagagagaatcctgaaagcaacaacaaaaaagaagcaaaccacatacaaggaaattccaataaggcagaaactttacaggtcagaagagggtgggatgatatattccgagtactgggaaaactttacctagaaaatgtttccttcagaaatgcagagagataaagactttgccacacaattccagttagacaagagaaataaattaaagacatctattgtacactatggtgactacagttaataaattacccattccaatatatacatatataaacattgtgatgtacatcataatatattctatttttccctgtcaattaaaaaataaatttaaaaagattggatagagaagaatcagccattctagtaattaagcctgaggaagcttacattccagtgatttcagataaccattatgcaagttaaggaataaactggataggatgatattaaaaaaacaaaaccaccaatgagatacaccagaatggctaaaattaaaaaggctgtccataccaagtattggtaaagatgtagagtaatgagaactctcataaatttctggtcaggaaatccaaacatcgaaagccaaacatcggcataccctattgactcaggaaatccactcctagtatacacctgttatgtcctgaatcatgtcccctagaattaatatgctgaagccctaacactagtatttcagaatgtgactgtatttggagatagggtctttaaggggtttattaagttaaaatgaggttgttacaatgggccctaatccaatatgactagtgtccttataagaagaggaaatgtgggccaggcacagtggctcacgcctgtaatcccagcattttgggaggccaaggcgggcggatcacgaggtcaagagatcgagaccatcctggccaacatggtgaaaccccatctctactgaaaatacaaaaattagctggacatggtggcgagctcctgtagtcccagctactcgggagactgaggcagaagattgcttgaacccaggaggtggaggttgcagtgagcagagatcacgccactgcactccagactggcagacagaccgagactccatttgaaaaaaaaaaagaagaggaaatgtgtacacacagagacaccagggatgcatattcacagaggaaagaccaagccaaggagaggtgtcagtaaaaaccaaacctgccaataccttgatcttggaattttagtgttcaaaactgtgagaaaacacattcctgttatttacacctcccagtctgtggtatattgttatggcaaccctagccactagtacagcacccaaaagtagtgtgtacatatttcacaaaagacatgtaactatttaatccatgtggagtgtcaaaaggcaaaaatacaacaaatgtattttaaagattgtaattggcttttatacatgattctagaatcagatagccctcagaaccaaatacagaacagcagccagcaacatagtatggatagaaattggaagtgaggtttagagacagcttaattgattacagttgggcatttttgccttatttgaagctgttagtcgcctgcaattgatggaagttcagctgctataatcggctgagactgagctgtttgttataaaagcatattcctaaattaggctttcagttagttcatcaactaagccaggctgcaactttgttgtgcaaggactcaagtgcaaaggtacccttaggcaaaattcagattaatttaaaaggactttacttttgttagttatgtgaaatgaagtggaatctattttttccaagtggatagtcatattttctattatcatttaccaactagctgatttttttcctgtactggttggagatgctgcctttattatatattaagtttcaacttattatatattaagtttccgcttacatcttgtcagtttctggactccatattttgtttgatatatttatctattctgcattaagactgcatttttaattataatagctttataatatctcaatgttgtataggaaaaaaacttcaattattaattagttatactaagccaatgtctaagtattgcttagtggtttgtgggcaaccatcttacacagtacctagtaacagagtagacaagtgtttattgaatggatggatgaatggatgtgtggaagaggctttcagaaacaattcccttcatagactaaggccaatgttacttttgcttagctctttagtttgaaataatttaaaatgtacagaaaagttacaagaataatacatggaacttgcacacaccctttacccagattcacaaatgtttaacattttgcaattttgtttttcattttcttttctttatatacacacttctgttacttattttctatttgaaaattagttgcagacatcacatccctttacctctcaatactttagtacacatttcctgtgaataaagatatcttttacataacagacacttcaaattgataaagcacatttccataatttacaactggtattccagttgtatcaaccaatgctgtcatttatagcattttcttctttgaagtacagggatctagtacaagtaactacttgtcctgcttctttcatttccttgaatctggaccttcatcagatggtaactttaagcacccaaaggtttttttctggtttctcctctgtgtagtttaagaccatgcaaacatcttgctactcatcaaaatgccccccatataacatccaaattaatctttatcatgatggtttatgactgtctcctcacattgggattggggcccaactgattattaacaatctacttttttggaagatataatatctcttcctgggaataagataatgggcataacatataataattcctaattgtatcatgacaatcacaatccaaaatactaaatctgtgatgtgtctaaatctcttttccccattgtttttgcaggcatcaatggctatgtttttgatagtttgcagttgtcagtttgtttgcatgaggtggcatactggtacattctaagcattggagcacagactgacttcctttctgtcttcttctctggatataccttcaaacacaaaatggtctatgaagacacactcaccctattcccattctcaggagaaactgtcttcatgtcgatggaaaacccaggttagttattatatttttcttgtaccaacagctgtgaatgcttcactagccattcgtatgctcttttgcccactagctcacatgctgtcatttatagcattttcttccttgaggtacagggatctagtttctcctctgagtagttattattttcacccttgcaactaataaacagtttgaaggatcacgtagtagttctatttttagttttttgaggaacctccttactcttttccacagtatttgtacttatttacactcccaccaacagtgtacaagcattccccttttgccacatcctcaccagcattttttaattattttgtctttttgataaaagccatttaactggagtgaaatatctcattgtgcttttggtttgcatttctctggtaattagtgatgttgagcagtttttcatatacttgttggccatttgtatgtcttctttttttttttttttttttttttttcagacggagtctcgctctgtagcccaggctggagtgcggtggcacgatctcggctcactgcaagctccgccacccgggttcacgccattctcctgcctcagcctcccgagtagctgggactacaggtgcccgccaccacacccagctaattttttgtatttttagtagagacagggtttcaccgtgttagccaggatggtctcgatttcctgacctcgtgatccacccgcctcggcctcccaaagtgctgggattacaggcgtgagccaccgtgcccagcctgaatgtcttcttttgagaaatgtctattcagatctttgtccatttttaatagggttctttgttttttttgctattgactagagtttcttatatattctggttattaatgccctctcagttgtatagtttgcaaatatttcatcccatcctataaattgtctcttcactttgttaattgtttcctttgctgtccagaagctttatggcttgatataatcccatttgtctacttttgctttagtcccctgtgcttttgaggtcttacctgcaaaatctttcccagaccaatgtcctggcgcattcccccaatgttttcttccagtagtttcatactttcaggttgtatattttagtctctaatccattttgatttgatttttgtatatagtgagagataggggtatagtttcattcttctgcatgtggatatccagttttcccacaccatttattgaagagactattctttcaccagtgcgtgttcttggcactttgtcaaaggtgagttggctataaatgtgtggatttatttctgggttttctgtcgtgttccactggcatatatttctggttttatgccagtaccgtgctgtttttgttactacagctttgtagtatagtttcaagtcaagtagtgtcatgcctccagctttgttcattttgctccagattatttagctgtttggagtcttttgtggttccacacaaattttaagattcttttttctatttctgtgaaaaacttcactggcatttggataggtattacattaaatctggtagcattgatattttaacaatattagtttttccagcccattaaaatgggatagataccttttcagttttttgtgtgttcttcaattccctttatcagtattttagttttcattatagagatatctcagctctttggtttaatttattccaatatatttatttttattatagctattgtaaatgatttttaaaaaatttctttttaggttgttagctcttggtatatagaaatgctactgatttttgcatgttggttttgtatcctgcaactttactgaatttgtttatcagttctaatagttttttgatggagtctttagttttttgtgaaatataagattatgtcatctataaacaaggagaatttgacttcttcctttccaatttgggtaccctttatttctttctcttgcttacttgttctggcttggacttccaggactacattttatagaattggtgaaagtgggcatccttatcttgtttcagatcttaaaggaaaggcttttggttttccacatttggtatgatattagccgtagtttgtcatatatggcatttattgttttgaggtaagctttctatacccagtttgtttagagttttctcatgaagggatgttgaatttaatctttttggcatcaattgaaatgatcatttgtttttgtccttcattctgttgatatgatgtatcacattgattcatttccatatgttgaaccatccttgcatccctgggatgaatcccccttgatcatgatgaatgatcttttactgtgttgttgaatttggtttgctagtagttcgttgaggatttttgcatcaatgttcatcagagatattggcctgtagtttctttttgtgtatgtgtgtgtctttgtctggtttggtttcagggtaatactggccttgtggaatcagtttggaagtatttttcccccttgatttttgggatagtttgtgaagagctggtattagttctttttttttattattatacattaagttttagggtacatgtgcacaatgtgcaggttagttacatatgtatacatgtgccatgctggtgtgctgtacccattaactcgtcatttagcattaggtatatcgcctaatgctatccctctccccttcccccaccccacaacagtccccagagtgtgatgttccccttcctgtgtccatgtgttctcattgttcaattcccacctatgagtgagaatatgcagtgtttggttttttgttcttgcgatcgtttactgagaatgatgatttccaatttcatccatgtccctacaaaggacatgaactcatcatttttatggcggcatagtattccatggtgtatatgtgccacattttcttactccagtctatcattgttggacatttgggttggttccaagtctttgctattgtgaatactgccgctataaacatacgtgtgcatgtgtctctatagcagcatgatttatagtcctttgggtatatacccagtaatgggatggctgggtcaaatggtatttctagttctagatccctgaggaatcgccacactgacttccacaatggttgaactagtttacagtcccaccaacattgtaaaagtgttcctatttctccacatcctctccagcacctgttgtttcctgactttttaatgatcgccattctaactggtgtgagatggtatctcactgtggttttgatttgcatttctctgatggccagtgatggtgagcattttttcatgtgttttttggctgcataaatgtcttcttttgtgaagtgtctgttcatgtccttcgcccactttttgatggggttgtttgtttttttcttgtaaatttgtttgagttcattgtagattctggatattagccctttgtcagatgagtaggttgcgaaaattttctcccattttgtaggttgcctgttcactctgatggtagtttcttttgctgtgcagaagctctttagtttaattagttcccatttgtcaattttggcttttgttgccattgcttttggtgttttagacatgaagtccttgcacatgcctatgtcctgaatggtattgcctaggttttcttctagggtttttatggttttaggtctaacgtttaagtctttaatccatcttgaattaattttagtataaggtgtaaggaagggttccagtttcagctttctacatatggctagccagttttcccagcaccatttattaaatagggaatcctttccccactgcttatttttctcaggcttgtcaaagatcaggtagttgtagatgcgtggcgttatttctgagggctctgttctgttccattggtctatatctctgttttggtaccagtaccatgctgttttggttactgtagccttgtagcatagtttgaagtcagggagcgtgatgcctccagctttgttcattaggcttaggattgacttggcgatgcgggctcttttttggtttcatatgaactttaaagtagttttttccaattctgtgaagaaagtcattggtagcttgatggggatggcattgaatctataaattacattgggcagtatggccattttcatgatattgattcttcctacccatgagcatggaatagtcttccatttgtttgtatcctcttttatttccttgagcagtggtttgtagttctccttgaagaggtccttcacatccgttgtaagttgtattcctaggtattttattctctttgaagcaattgtgaatgggagttcgcttatgatttggctctctgtttgcctgttattggtgtataagaatgcttgtgatttttgtacattgattttgtatcctgaggctttgctgaagttgcttatcagcttaaggagattttgggctgagacaatggggttttctagatatacaatcctgacatctgcaaacagggacaatttgacttcctcttttcctaattgaatacactttatttccttctcctgcctaattgccctggccagaacttccaacactatgttgaataggaaaggtgagagaaggcatccctgtcttgtgccagttttcaaagggaatgcttccagtttttgcccattcagtatgatattggctgtgggtttgccatagatagctcttattattttgagatacgtcccatcaataccaaatttattgagagtttttagcatgaagggttgttgaattttgtcaaaggccttttctgcatctattgagataatcatgtggtttttgtctttggttctgtttatatgctggattacatttattgatttgcatatattgaaccagccttgcatcccagggatgaagcccacttgatcatggtggataagctttttgatgtgctgctggattcggtttgccagtattttattgaggatttttgcatcaatgttcatcaaggatattggtctaaaattctcttttttggttttgtctctgcccggctttggtatcaggatgatgctggcctcataaaatgagttcaggaggattccctctttttctattgattggaatagtttcagaaggaatggtaccaattcctccttctacctctggtagaatttggctgtgaatccatctggtcctggactcttttcggttggtaagctattgattattgccacaatttcagagcctgttattggtctattcagagattcaacttcttcctggtttagtcttgggagggtgtatgtgtcgaggaatttatccatttcttctagattttctagtttatttgcgtagaggtgtttgtagtattctctgatggtagtttgtatttctgtgggattggtggtgatatcccctttatcattttttattgcatctatttgattcttctctcttttcttctttattagtcttgctagcggtctatcaattctgttgatcctttcaaaaaaccagctcctggattcattaattttttgaagggttttttgtgtctctatttccttcagttctgctctgattttagttatttcttgccttctgctagcttttgaatgtgtttgctcttgcttttctagttcttttaattgtgatgttagggtgtcaattttggatctttcctgctttctcttgtgggcatttagtgctataaatttccatctacacactgctttgaatgtgtcccagagattctggtatgttgtgtctttgttctcattggtttcaaagaacatctttatttctgccttcatttcgttatgtacccagtagtcattcaggagcaggttgttcagtttccatgtagttgagcggttttgagtgagtttcttaatcctgagttctagtttgattgcactgtggtctgagagacagtttgttataatttctgttgttttacatttgctgaggagagctttacttccaactatgtggtcaattttggaataggtgtggtgtggtgctgaaaaaaatgtatattctgttgatttggggtggagagttctgtggatgtctattaggtccgcttggtgcagagctgagttcaattcctgagtatccttgttaactttctgtctcgttgatctgtctaatgttgacagtggggtgttaaagtctcccattattattgtgtgggagtctaagtctctttgtaggtcactcaggacttgctttatgaaactgggtgctcctgtattgggtgcatatatatttaggatagttagctcttcttgttgaattgatccctttaccattatgtaatggccttctttgtctcttttgatctttgttggtttaaagtctgttctatcagagactaggattgcaacccctgcctttttttgttttccacttgcttggtagatcttcctccatccttttattttgaggctatgtgtgtttctgcacgtgagatgggtttcctgaatacagcacactgatgggtcttgactctttatccaatttgccagtctgtgtcttttaattggagcatttagtccatttacatttaaagttaatattgttatgtgtgaatttgatcttgtcattttgatgttagctggttattttgctcgttagttgattcagtttcttcctagcattgatggtctttacaatttggcatgattttgcagtggctggtactggttgctcctttccatgtttagtgcttccttcagaagctctcttaggtcaggcctggtggtgacaaaatctctcagcatttgcttgtctgtaaaggattttatttctccttcacttatgaagcttagtttggctggatatgaaattctgggttgaaaattcttttctttaagaatgttgaatgttggcccccactctcttctggcttgtagagtttctgccgaaagatcagctgttagtctgatgggcttccctttgtgggtaacccgacctttctgtctggctgtccttaacattttttccttcatttcaactttggtgaatctgacaattatatgtcttggagttgctcttctcaaggagtatctttgtggcattctctgtatttcctgaatttgaatgttggcctgccttgctagatttggcaagttctcttggataataccctgcagagtgttttccaacttggttccattctccccatcactttcaggtacaccaatcagttgtagatttggtcttttcacatagtcccgtatttcttggaggcttcgtttgtttctttttattcttttttctctaaacttatcttcacacttcattttattcatttcatcttccattgctgataccctttcttccagttgatcgcattggttactgaggcttgtgcattcatcacatagttctcgtgccgtggttttcagctccatcaggtcctttaaccacttctctgcattggttattctagttgtccattcgtctaattttttttcaaagtttataacttctttgccattggttcgaacttcttcctttagctcggagtagtttgatcttctgaagccttcctctctcaactcatcaaagtcattctccatccagctttgttccattgctggtgaggagctgcattcctttggaggaggggaggtgctctgattcttagagtttttggtttttctgctctgttttttccccatctttgtggttttatctacctttggtctttgatgatggtgacgtacagatgggttttcggtgtggatgtcctttctgtttgttagttttccttctaacagtcaggaccctcagctgcaggtctgttggagtttgctggaggtccactccagaccctgtttgcctgggtatcagcagcagaggctgcagaacagcagatattggtgaactgcaaatgctgctgcctgatcattcctctggaagttttgtctcagaggagtagctggccatgtgaggtgtcagtctgcccctactggggggtgcctcccagttaggctactcaggattcagggacccacttgaggaggcagtctgcccgttctcagatctcaagctgcgtgctgggagaaccactactctcttcaaagctgtcagacagggacatttaagtctgcagaggttattgctgtcttttgtttgtctgtgccctgcccgcagaggtggagcctacagaggcaggcaggcctccttgagctgtggggggctccacccagttcgagcttcccggccgctttgtttacctactcaagcctgagcaatggcgggcacccatcccccagccttgctgccaccttgcagtttgatctcagactgctgtgctagcaatgagcaaggctccatgggcgtaggaccctctgagccaggtgcaggatataatctcctggtgtgccgtttgttaagcccgttggaagagcgcagtattagggtgggagtgacccgattttccaggtgccatctgtcacccctttctttgactaggaaagggaattccctgaccccttgtgcttcctgggtgaggcgatgcctcgccctgcttcggctcacgcacagtgcactgcacccactgtcctgcacccactgtccggcactccccagtaagatgaacccggtacctcagttggaaatgcagaaatcacccgtcttctgcatcacttatgctgggagctgtagactggagctgttcctattcggccatcttggctcccaatgcaaagaccttcaaacaacgtgacttcattttctcactcctaccttttgtgctcttgtcatttatttgaattctacatatattttaaaccccataagacattattattgttttatataatcaatatcatttatatatatatatatatttacacctttcatttctttcattcttttctgcatttcttgcttccatctatgatcattttctttttgtctgaagaaacttctttggaacttccttcagtgtgtgttggctagtaaaaagttctctgtcagtttttggtcagaatgggtctttattttgcctagatacaagtccttggttggatttacatattgtgaatgttttctcccagtctgtggtttgtcttttcactcctttaagggtgcattatggttaatagaagttcttacatttaattaattcttatttttcagttttttatggttaatgccttttgtattctgtttcagaaatttttgcctatcctaagaacatgatgccatccttctatattttctttctacatattttaaatattttcttctagaagtctgattgctgtgttgttcacaattaagtttatgattcatttttaattaattttgatggagtgatgcagataaaagttcatttttccatatggatatttaattgctctagcaccaattgttggaaaaaaataatttcctcactgaattgcactgttgtctttgccatgaatctgatgactgtatcactgtagctttgtttctgtactctatttcaggggtaggttatgatccacaagccaaatttgcagcttgtttttatatggcattgagctaagaatttttttacatttttaaagaattgtcacacaaaacaaaaaaaaagcaaaaaaacaaataaggatatgtatcatggaccatatgtgtctacaaacctaaaatatttactatgttgctttttacagaaaaagtttgccaacccctgatctcttatattccattgacttattggtctatctttgtaccagtaacatactatcttatagtaagttttaatatttgttagtataattcctccaactttgctctctttgatttttatataaattttagaatcatcttgtcaattttatcaataaaaatatcttctgaggttttgatagggattacattgattctgcagatcaatttgggggagcatacctcttgacaatattgagtattcctgtccatgagcatggtttagttatttatttacatcttttaaattttctcttggcaatgtttttgtaaaattttagtgtacaggtcttgcacatttttgtaaagtgtattctttggtatttaatgctattataatattttttatggtatcagtttttgtcaattgtgtttttctagaaatatgtccctttcatctaagttgtttaatttacttgaagtaagttatttgtaatgttcttttatcatccttataatgtctgtactgatgtctccgttttcatacctgatattgttatttatattttatctattttaagtttatcgcctgcacccactaactcgtcatctagcattaggtatatctcccaatgatatccctcgcccctccccctagtgcacatgtaccctaaaacttaaagtataataaaaaaaaaaagtttgtcgcctttgttataggttcatcaaatttactaatcctaccataggatcaaatttttgctttgttcatcaggtcatggaattaaaaaaatttttttgttttgtttattttctatgttgaatttttatttttattttgctttgcatttcatttatttctggtcttttgttattattccaatactttctctggattcagttttctttttcttcttgacttcttgagattaaaacttggttcattgattttcaacatttcttactttttaaaagttcatacaaagcataaatttccctttatatactgctttaaccccatatcacaaattttgatgagtcatatttttattatcattgagtttaaaatattttataaattttacgttatttcttgttttattcatagttattttacagtgttttacttaatttcccaatatatggcgattttctggctctctctctgttgctgatttatttgttttactgtgatcacataacatactctatattatttcaatcatttgaaatttgttgagacttgctatatgcccagtgaataatttaatttgattaatggcccactgcatttgaaacaaatatgtctttgctgttattgggtagagtgtcatatatttgcctattatgtcaagttgctttatcatgtttttaaaatccttataaacttcctgatattttatctgtttcttacagacatggaggaaactgtgacatctctgtgattgttgagtttgttattttgatttttgtatttgttagtaagaatgtttcaaaataaatgaggcaatataaaatcaggtgcttacaactttaaggttgtattcttattaaatcaattctttcatctttgtgaaatgtcctttttgtctgaagtagtacttgttgccttaaacgtctgcattgtctaaaatttatacacctgcactatcatatttattttgcttaatgtttgtgtggtatatatttcccattcttttcttttcaacctatctctatccttatatttacagtgtgtcttttttaacattttctgtagtgcaagtctgttggttaattaattttgtcagtttttgcttctctgaaaagtctttatttctgtttttgaattatatcttcactgtgtatagaattctgggtttgtggttgttgtttttgttttattacattttgttttattggtttttccctcagcactttaaaaatgccgctccattgtttctacttgcatagtttttcacaataagtttgttgtaattcccatttgcattcaactgtacataatgtatctttttaaaaaaatctggatggcttcaagctctttactttgatttttgtgtgtgtgtgtgtgtgtgtgtgtgtgtgtgtgtgtgtgtgttactttggcattctctaggcttattcaatctgtaatttggtatcattaattttgaaaaatatttatcatctgtgtcttcaaatattgcttctaattctttctcttcttctggtattgcatttacatatattatactgttcaattttgtcacacagctcttgaatatgctgttctagtttgttttctaactatttttccttctagttgttcagttttgttgacatttattgacctatttttacttcagtaattgtttcctgggttgttgagttaattgatgaactcatagatgacatacaatttatctttttattcttgtgtcacttgtgcttttgatgtcacatctaggaaggctttgtctagcccaaggccacatttacttccatattttcttctaagagtttgatagttgtagctgttacatatatgtctatgatctagtttgaataaatttttgtgtatggtgtgaagaagaggtctaacctcttttttattttttgcatgtaaacatccagttgtcccggcaccatttgttgaaaatatgattcttttcccattaagtcatcttgacacccttgttgaaaatcaattgaccataaatgtgagagtttatttctgaactctccattctgttccattgacccatacgtcttctataaattcttatagctaattctacattagactttggtttttcagatgtggtcatctcattagattatggtgatatgtttggttacaagttttatcttctccttggcaacattttttttattactgctcttcttttattcgtttttgttgttcctttctctttttgtgagacagggtctcactctgttgcccagggtggagtaagtggtgtgatcatggctcactgcagcctcaacctcctgggctcaagcaatcctcccacctcagcctcccaagtagtgggactacaggcatgcaccatcatgccaggctaacttttttattttttgtagagacagggtcttgctttgttgcccaggctggtcttgaactccaagctcaagcaatcctccaacctcagcttcccaaagtgctgggattaccagtatgagccactgcacctggccttgttgttcctttcttccttttatcttgtagtatcttgatcctttttgcttattatttatcattgaggtgagtttgttctaaataaacttttcgcagaaagtttatgtagatatattaatatcaatgaggcattaggagtgagttttagattagcaggaattctcttatgaaaggtattgattgtatgtgtgagttttcagcctttacttctctccagcccatcaagatcaaagctgcagagttgtttacatttcagaatttctttcctcccctccccaccttgcaaaacagacttacagtgcaaaaatgacttgtcaatgtgattctttcttctggtcccatctttcctaccttttgagacttgtgttgaaaggagtccagtaaaaccaccgatgctagcttgtataccctgatcccattgttataatgaatgactgactgtttttcatatcaaagtataatacttgcaccttgatagaagaaagaaacaaggccaggcacagtggttcatgcctgtaatcccagcactttgggaggctgaagtaggaggaataattagactttgatattaaaaatggggaagatatggcggtataagatatgaggaagtatgtcttcttggacttttctgaaatctgccagccatgagcatccactctttttatcttttgatacctgttttatattaactatacttctattttgtggtttcatggcttcagatatcttccagcttaattgtactctgtctttaattatttgcagcaatttctgaaaggagcaagaagaaaggccagccctttcttcactaccttaaaaactggtcatcttttgaaaccccatgaaaggcacagtgggtgaccatctacatcaggagtgggcaaactatggcccttgggtagtctggtctctgtccgtttttgtaaggttttattggaacccatacacacacaaactgatcatctcttgttatgtgttaagttttcttataattattcttttctatttcatccagctgaattaccatttcaccttgtgtatgccctttccagtcttaaattatagaagctatgtctttgtggttttaaattatggaagctgtgccttcttgtgttttagtatggcaagatatttgttcttacttttcctctagaatctgcagtggattactttcagaagtaggtattgcctctaagtttcctgacttctgtttccttctccctgttctgtagtatatttatagattgcatgttttctcgtccttaaacaaggtacaaatatgttctgatcaaggtttgctagccgagaggataagtggcttgctcttagcctaactctctgtctacttaatggatgtcgaattcccttctcaactcaacagctagtaactagttccaagatcggataatagcttacagaattaattagttcagtgaaagccctggtttgatcacagaggcaggagactgatctatatatttgtagtgctgactagaccccaacttggccagatagcttatacctatgtcagaagttggaggaggagattgacagctgaggtgtctccaagggaattacaattattttcattttctttgtgtctgtaattatgtctcttttcttacttcaaattttgtatatgtgaaatttcttaatttttatttggttatttattttattgactttttcatcaaacaaccaactctaagttcttggattgaaatttatgaattaattataatgttttaaatttaccattagtcacacatacaatacaaaaagatattttcattacaaaattttaacccaagccattaaaactaaactccagcttggtcaccattcctaataccaggcccctctcagaggggagggtaaataaaagtccattttggtaactagtttgacgagaatctctaattgtttccctgtttttcttataatgtctgcctttgaattatcctctttttttcaagagttccatcatataatgtattcctttttgcttacagattgacctcctagaggcatgcatccccctgctccagtctgagctggttctctctaggcctgaggctcagttatcaacttgggacttttatttaccctccctcaggataggtacctggttcttggataccaggtcttactcttgtttgagatactcctttattttggtggcaaacattccataatcacttcctgataatggtgacatttgaggtagattttctgagtctttatatgttagaatatgtttttattctcctttgccacttgattgataatttggctgcacatagaatgtaagcattcacagggcttttgggagcagcttcccttgagaagaaggtggatgcagttaagatcttccctgaaaagactgtgtgaaatgacaaggctattgaggtacccaacgggtagcttggtaaaggtgtatcttgtctcttatgtttatgcatctactttaccaccatgtaattagcctattataacttgttgcattccttcactcagctaatcttgttcatggtagaaattaatattgctagtaccatggtagaattttatattagctggatcctagacctaaatgctccttccttgtgcttacatattctgcaagtgggtgacagtggatgctaggtattgtgttatgtgatttcaatgtattatatgatggggtagatactattagcctcatttgaaaattagaaacctattgttcagaaagtttaagtgactttctcaaagtcacacagctggtaaatggtagaactgggatttgaatccaggcaatctgatggatttaagaggaacctgtgccactatgtgatatagcaataacatctagccaatataaatactttcctgaattaaatcactgtcatattcagagagttctgtgtcactattaagaccctccattattgtgtatattaattacatttccctattttaatcccaatatctattcatttttatcacagtcctttcttatggtcacaaacaggcatagtacaacagcagcaatgcaaaaaccacttttatattacatgttccagggatttaacccaatgacctgtgatataatgatactgactagtattttttcatttatctgggaatgggagagaacctctaacagaacgttttagaatctgtgttatgagtaaccagagtcttattcttcctcatctccaggtctatggattctggggtgccacaactcagactttcggaacagaggcatgaccgccttactgaaggtttctagttgtgacaagaacactggtgattattacgaggacagttatgaagatatttcagcatacttgctgagtaaaaacaatgccattgaaccaagaagcttctcccagaattcaagacaccctagcactaggcaaaagcaatttaatgccaccacaattccagaaaatgacatagagaagactgacccttggtttgcacacagaacacctatgcctaaaatacaaaatgtctcctctagtgatttgttgatgctcttgcgacagagtcctactccacatgggctatccttatctgatctccaagaagccaaatatgagactttttctgatgatccatcacctggagcaatagacagtaataacagcctgtctgaaatgacacacttcaggccacagctccatcacagtggggacatggtatttacccctgagtcaggcctccaattaagattaaatgagaaactggggacaactgcagcaacagagttgaagaaacttgatttcaaagtttctagtacatcaaataatctgatttcaacaattccatcagacaatttggcagcaggtactgataatacaagttccttaggacccccaagtatgccagttcattatgatagtcaattagataccactctatttggcaaaaagtcatctccccttactgagtctggtggacctctgagcttgagtgaagaaaataatgattcaaagttgttagaatcaggtttaatgaatagccaagaaagttcatggggaaaaaatgtatcgtcaacagagagtggtaggttatttaaagggaaaagagctcatggacctgctttgttgactaaagataatgccttattcaaagttagcatctctttgttaaagacaaacaaaacttccaataattcagcaactaatagaaagactcacattgatggcccatcattattaattgagaatagtccatcagtctggcaaaatatattagaaagtgacactgagtttaaaaaagtgacacctttgattcatgacagaatgcttatggacaaaaatgctacagctttgaggctaaatcatatgtcaaataaaactacttcatcaaaaaacatggaaatggtccaacagaaaaaagagggccccattccaccagatgcacaaaatccagatatgtcgttctttaagatgctattcttgccagaatcagcaaggtggatacaaaggactcatggaaagaactctctgaactctgggcaaggccccagtccaaagcaattagtatccttaggaccagaaaaatctgtggaaggtcagaatttcttgtctgagaaaaacaaagtggtagtaggaaagggtgaatttacaaaggacgtaggactcaaagagatggtttttccaagcagcagaaacctatttcttactaacttggataatttacatgaaaataatacacacaatcaagaaaaaaaaattcaggaagaaatagaaaagaaggaaacattaatccaagagaatgtagttttgcctcagatacatacagtgactggcactaagaatttcatgaagaaccttttcttactgagcactaggcaaaatgtagaaggttcatatgagggggcatatgctccagtacttcaagattttaggtcattaaatgattcaacaaatagaacaaagaaacacacagctcatttctcaaaaaaaggggaggaagaaaacttggaaggcttgggaaatcaaaccaagcaaattgtagagaaatatgcatgcaccacaaggatatctcctaatacaagccagcagaattttgtcacgcaacgtagtaagagagctttgaaacaattcagactcccactagaagaaacagaacttgaaaaaaggataattgtggatgacacctcaacccagtggtccaaaaacatgaaacatttgaccccgagcaccctcacacagatagactacaatgagaaggagaaaggggccattactcagtctcccttatcagattgccttacgaggagtcatagcatccctcaagcaaatagatctccattacccattgcaaaggtatcatcatttccatctattagacctatatatctgaccagggtcctattccaagacaactcttctcatcttccagcagcatcttatagaaagaaagattctggggtccaagaaagcagtcatttcttacaaggagccaaaaaaaataacctttctttagccattctaaccttggagatgactggtgatcaaagagaggttggctccctggggacaagtgccacaaattcagtcacatacaagaaagttgagaacactgttctcccgaaaccagacttgcccaaaacatctggcaaagttgaattgcttccaaaagttcacatttatcagaaggacctattccctacggaaactagcaatgggtctcctggccatctggatctcgtggaagggagccttcttcagggaacagagggagcgattaagtggaatgaagcaaacagacctggaaaagttccctttctgagagtagcaacagaaagctctgcaaagactccctccaagctattggatcctcttgcttgggataaccactatggtactcagataccaaaagaagagtggaaatcccaagagaagtcaccagaaaaaacagcttttaagaaaaaggataccattttgtccctgaacgcttgtgaaagcaatcatgcaatagcagcaataaatgagggacaaaataagcccgaaatagaagtcacctgggcaaagcaaggtaggactgaaaggctgtgctctcaaaacccaccagtcttgaaacgccatcaacgggaaataactcgtactactcttcagtcagatcaagaggaaattgactatgatgataccatatcagttgaaatgaagaaggaagattttgacatttatgatgaggatgaaaatcagagcccccgcagctttcaaaagaaaacacgacactattttattgctgcagtggagaggctctgggattatgggatgagtagctccccacatgttctaagaaacaggtatgaatgcattggttattcctttgctctgctcttgtgacatttgactttaccagatgatgacaccaacaatgagagttagaggatgaaaaatcaaggtgtcttgaaactcttactctggtgagatagagagaagagaggtttacaagagggtagaggaatcagggacaagaaggagcaatggggagcaggaagaaagtcaacctcacctatcaaccttatgagctgcaggggaaatcttagtctcatcagagaactttaagcaaggcagaaggaagaagcaagttcgtgttaaagaggttaaggacttggggaggattggttttcatgatactggggatccagagggcaaagtaggatgattttatttttaggtgagtagagggaggttgagcagtcaagtagtacagagaaatgtggaatataaacataaggagagtcagtcagtcacaaatatttatggaacacctactacatgccagacacttttgtacacattggagtgcagcacagcaggagcttatattctattggaaagagcaagagacaagttagtacaaaactaaataaggcaatctcaattgtgttgttcagaagatagaatagaataatatggtagagagaataatatgatagagtaatacggtagagtgttacattagctgtggtggtcatagaaatcatctttgaggagttgagacctaaatgatgataacaggccagctgatggagctctgagagaagatgtttccagacagagggaagagaaaatgcaaaggccctgagaatggaaaaagtttaccatgtttgaggaacaagaagggacaagcatgacttgtcactttcccaccttgctttctagctcaagtaagcccttattgctgcattgcaaccatagactatttccctagtccactgactttctcattctcctggacctctatcttagattttctgtgttttccttaaatctcgagcaccttttttccattctccaatgcccattttcactcttagctgatgctgtgcaatgaacctccacagactcccaacatcacatttactggcatttgtacccatatactctgcctgcacacttattacaataaatagagtgtctgtgctcctaaggccaacctctccagttttgtacttgattcccatctcttctcccttcataaaaaatgttgctccagcaatttctccttttctcccttacatcatcaatttatctctccactagattaatctcatcaacatcaatcatgctattatttcctcccctatctttacagaaaccgtcttaaaataattgtccctgcttgcagcctttgcatcttttcctgccattctctcctctttaacccactccaaagaagcttttatctctattatttcataagaactacattttcaaggtcattattgatctttacattactgattactagccctcatcttatttgaattctcagtagtatttgagaggtgattactccatcgttgatacaggttctcacttggtttctctaacaccacttttcttcacttttctactaaacttactgccaatctttgtcaactttgcgagtccttcttcatccccctaatctttaaaggttagagtgctccagggattagttctccaacttcttctttattctatttatactcactctgtgacgacattgtttagcctcatgattttaagtactatctatctgcagataattccagttgaatatctggagatattctcagatctctctcctgaagtcaaaatttacatatcaactccctaccttaacatgcacacaattagactcttaattcctgccccttcccaaaacctgctgattgctcagccttctccatggcaatcaaaaaccattcctggccgggcatggtggctcactcctgtaaccccagcacttggggaagctgaggcaggtggattggttgagccccagagttcaagatcagcctgggcaacatggcaaaacctcatctctattaaaaatacaaaaattagccaggcgtggtggtgcacacctgcagtcccagctactcaggaggctgaggcacgagaatcgcttgaactggggagacggaggttgcagtgagctgagatggcctcactgcactccagcctgggcaacagagtcagacttgatctcaaaaaaataaataagtaaaaccattccctatttcagttattcagtcacagatcttgaagttttccaactctttttttcttacattaacatctaatctgtaaaggatcctgtattagtccattttcacactgctaataaagacatacctgagactgggcaatttacaaaagaaagaagtttaatggactcacagttccacatggctggggaggcctcacaatcatggcagaaggcagggaggagcaagttatatctcacatggatggcacaggcaaagagagagagcttgtgcagggaaactcctctttttaaaaccatcagatcttgtgagacttattcactatcatgagaacagcaagggaaggacctactgccatgattcagttacctcctatcaggtccctcccacagaacatgggaattcaagatgagatttgggtagggacacagccaaaccatatcattccaccccatcccctcccaaatctcgtgtcctcacatttcaaaaccaatcatgccttcccaacagtcccccaaagtcataacacatttcagcattaactcaaaagtccacagtccaatgtctcatctaagacaaggcaagtcccttccacctatgagcatgtaaagtcaaaagcaagttagttacttcctagatacaatggggtataggcattgggtaaatacagccattccaaatgggagaaattggccaaaacaaagggcctacaggccccatgcaagtctgaaattctacggggcagtcaaatcttaaatctctaaagtgatctcctttgactccatgtcttgcatctgagtcatgctgatgcaagaggtgggtgcccatggtcttgggcagctccacccctgtggctttgcagggtacagcctcccttgtgtctgccttcatgggctggcattttctgtagcttttccagatgctggtgcaagtttctgatggatctaccattccggggtctggaggacggtggccctcttctcacagctccactaggtggtaccccagtagggactctgtgtgggtgccctgagcccacatttcccttctgcactgccctagcagagtttctacatgaaggcccacccccgcagcaaacttctgcctgggcatccaggcacttccattaatttctaaacaacaaagcattcaagaggcgacttgggtgctattaagggcattcagtttcataagggaagcagagcataaaagtttggaaaatttgcagcctgataatgttagagaaaagcaaatcccattttctgaggagaaattcaagcaggctgcagaaatttgcataagtaatgaggagccgaatgttaatccccaagacaatggggaaaatgtctccagggcatgtcagaggtcttcacaccagcccctcccatcaccggcccagaggcctaagaggaaaaagttgtttcatgggctgggcccaggatccccatgctgtgtgcagcctagggagtcggtgccttgtgtcccagccgctacagccatggctgaaaggggtcaatgtagagctcaggctgtggcttcatagggtacaagtcccaagccttggcagcttccacatgatgttgagcctgcgagtgcacagaagtcaagaactggggtttgggaacttccgcctagatttcagaagatgtatgaaaacacctggatgcctaggcagaagtttgctgcgggggtgggccctcatggagaacctctgctagggcagtgcagaagggaaatgtgggctcagagcacacacacagagtccctgctggggtaccacctagtggagctgtgagaagaggaccaccgtcctccaggccccagaatggtagataccctaaatcatctctttcaaattcgaagttccacaaatctctaggacaggagcaaaatgccaccagtatctttgctaaaacataacaagagttacctttgctccagttcccaacaagttcctcatctctatctgagaccacctcagcctggatttcattgtccatatcattatcagccttttggtcaaagccattcaacaagtctctagagagttccaaactttccacattttcctgtcgtcttctgagccctccaaactgttccaacctctgcctgttacccagttccaaagtcgcttccacatttttgggtatcttttcagcagcaccccactctactggtaccaacttactgtattagtctgttctcacactgctgataaagatatacctgagactgggaaatttacaaaggaaagaggttttatggacttactgttccacatggctggggaggcctcaaaatcatggcagaaggcaaggaggagcaagtcttgtcttacatggatggcagcaggcaaagaaagaaagcttgtgcaggaaaactcttttttttcttttcttctttttagacagagtcttgctctgtcacgcaggctggagtcagtggcgtgatcttggctcactgcaacctccacctcccgggttcaagtgattctcctgcctcagccttccaagtagctggtactacaggcatgtgccaccacatgagatgagattttggtagggacacagccaaaccatatcattccccctgtcccctcccaaatctcatgtcctcacatttcaaaaccaatcatgccttcccaacagtcccccaaagtcataactcatttcagcattaactcaaaagtccacagtatttttagtagagatggggtttcaccatattggccagactggtctctaactcctgaccttatgatccgcccgccttggcctcccaaagcactgggattacaggtgtgagccaccatgcccagccaaaaactcttctttttaaaaccatcagttctcatgagacttattcactatcacaagaacagcataggaaagatctgcccccatgattcaattacctcccaccaggtccctcccacaacacatgggaattcacgatgagatttgggtggggatcctcttggctatcatttcaaaaaatagtcagggttgattatggacttagtattgaataagatgaaaatgtactgaaatggaacgatgaagataattgaccagggaaagcaggttacaagccaagagaggatacagtgtcacttcagatgctataaaagtgatgtttttattttttgaatgttatttggctatattttcaaattatctgcactgcatatgcactgcttctgtaataataaaagggtattaaaataataaaatcaagtctataaatcacacacacacaccccagcctcttctctacacctcagtgactaccaaccacatctaaattatcatcatttctcatctgaattattgcaagaagccattgcaataattcagatgagagttgatacaaagccttcctgtttccaaccttaccctcatatagtcttttcccaacattgcatctaaagtaatttttcaaattgcaattctgatcactgttctctgcttcagatcctccagtggattttcatctcactcagtaaattccaaagccttcaccatggccttcaagaccctacgaaatttgaccctctgcaacctctctgccttcatctgttaccattgtctcctgttaatcctgcctcagccacactgacctccttgttcttctcaaatggactagatgtgtgcctatctctagaccattacagtttctgttctctctacttaaaattatgtccctgatactctaatgcaagttctcttacttccttcaggacgctgctcaaatttcattttatcagtgaggctttccctgaacactgtatgtaaatattgctcccaccattttttttcaatgcacttaacagtgcctgaaatattatatatttatttctttattgtctatcttctctgactataagttaagctcattaagaacacaaactttggaggtattgttcaatgttgtgtccccagaactttgaacagtgcctggcacgtggcagatgttcaaataaatgtatgttgaatgaattagaaaatgataaatgtagggagacaaaagcaggtctcccatttatatccaaactctaggactctaggaaagactgattatatggaatcgtgtcacacagcatccatgggcaagagtggaggcagagataccagttaagatgctattgcagtcatacagataaaagaagacagttatttagaccagtgtggtggtgacagaaatggaaagaaatggaaggatgttgggtataattaaagataagcatataagactggctgttaattgagtatgggaagaatgaggagagaggatgtaaagaacatttctttttgtttgtttgttttgttttgtttttgtttctttttattatactttaagttctagggtacgtgtgcacaacctgcaggtttgttacatatgtatacatgtgccatgttggtgtgctgcgcccattaactcatcatttacattaggtatatctcctaatgctatccctccctcttccccccaccccccaacaggccccggtgtgtgatgttcccctacctgtgtccaagtgttctcattgttcaattcccacctatgagtgagaacatacagtgtttggttttttgtccttgcgatagtttgctgagaatgatggtttccagcttcatccatgtccctacaaaggacatgaactcatccttttttagggctgcatagtattccatggtgtatatgtgccacattttcttaatccagtctatcattgatggacatttgggttggttccaagtctttgctattgtgaatagtgccgcaataaatatacgtgtgcatgtgtctttatagcagcatgatttatagtcctttgggtatatacccagtaatgggatggctgggtcaaatggcatttctagttctagatccctgaggaattgccacactgacttccacaatggttgaactagtttacagtcccaccaacagtgtaaaagtgttcctatttctccacatcctctccagcacgtgttgtttcctgactttttaatgatcgccattctaactggtgtgagatggtatctcactgtggttttgatttgcatttctctgatggccagtgatgatgagcatattttcatgtgtcttttggctgcataaatgtcttcttttgagaagtgtctgttcatatcctttgtataagattattagtggatttctcagaagaaatattgtagaccagaagggagtgaaaatatagatttaaaatcctgaaaggaaataaaaactagcaatgaaaaatactatatccagtaattttatctttcagaaatgaaggggtgataaagattttctcagaaagacaaaagctagatctgctttataagaaatgctagtaggagttcttcaagctgaagaaagaggatgcttattagtaatatgaaaacatatgaaaggataaaactcactagtaaaaataagtacattgtcaaatccaaaacactctagtagtgtaatggcagtgggtaaattaattatatctttagtataaaagataaaagacaaagaaagctattttaaaaactaaagctataataatgtgttaaggaatgcaaattattaaaatatgtaaactgtcacatcaaaaacataaaataggctgggcacagtggctcatggctgtaatcccaacactttgtgggggccaaggtgggaggatcacttgagcccaggcatttgagactaacttgggcaggatagtgagatctcatctctataaaaaatttaaaaattagtaaagcatggtggtgcatgcctgtagtcccagctactcaggaggtggaggtgggaggactgcttgagcctgggggggtcaaggctacagtaagcaatgatcacaccactacactccagcctgggcaacagagcaagaccctgtctcaaaaaaaataataatatgtaggaggaagggaataaaagtgtagagtttgtggatgcaataaaaattaagttgttatcagtttaaaatagcctgctaattttgtgtaagcctcatagtaaccacagagcaaaagcctatagtagatacacaaaacattttaaaaaggtccaaagcataccactacagaaagccatcaaactataaaggaagaatgcaacagaagaagaaaggatcaaaggatctaaaaaaaaaaaaagaaagaaagcaattaacaaaatgacacaagtatgaccaaagtccactgcttctttattactgatatagaatatctttcagatcttaagggactgattaattacttgggagagaaagtttgtgttgagaagatttgcttgtgttgcaatgagaaggggaagttctactcaacagaagctgtacaggcacatatgacaaaagctggtgtaagctttttacagatggtgatgctgctttggaatttgcagacttgtatgagtttaggagtagctacccagatcacaaggaaggggaggaccctaatgaggctgaggagtcgcccttaggaaaggacttagaatatgatgatgaaagcatggaactgattctgccttctgatgccagagtgggtcatcactccttgatgagatactacaaacagtgatttggcttgtcaagagctgtggtagttgctaaatattgtgaggccatgggccgagtgcttcagtaatagagagccctgggatagactggcaacacaggagcagctgttacatgaaagtgagacatgcattatatccaaaggatgaagtcaaaatggatgctgaagacagaaatgaagaacaatgccaccaagcagatgcactttagggtccaagtgagattctgagagtctgccaggattgagtgattgtctgctgcccaagtttcctccttgccctgaggaccagggaaagccagattgtatgatggacacttttgctgctacttcacttgctctaacataataataaaaatgaaaatctaaaaaatattttattgaagaatgaaggtgaaagaaatacattttcagacaagcataaacagagaaacttcaccattagcaaaagtccactaaaatattctaatgttatacttgagacaataaaaaagtgatacagaatggaaggcatgagagacaagatgggataaagagcaaacaaagttaaatatgtggataaatagagataagtatcataaaacatggtcaaatgttttatgagcgttaagatatatagaattgctttattcacagttggtttgctgtcataacacaagtatcatgaaaatcactgctaaatctaagccaaaattgggaaaggaaaaggttcatgtcactatcatcaacgttggacatgtagactcaggaaagttcaacactactggtcatctgatctataaatgtgatgtgatcaacaaaggaaccattgaaaaatttgagaaagaacctgctgagatgggaaagggctcatttgagtatgcttgggtcttggataactataaactgaacatgaatggaatatcaccattgatatctcctaaagaaacctgaggccaaaaatatcctgtgaccatcattgatgccccagcacacaggggctttattaaaaaaaaaaaaaaaaaaaaaaacatgattagagtgatatcaccaaaatggtggatagaagcaatctggcttcactctcctccagaaaaaccaaaaacaactattcagtgtctagcttatcaccaggaatatcccataactcaaaacagaggctgtgaggatctgagtggccacatagaagagaaaaactgcaagcagaagataacaaaaatgggcctgtttaactgcagcatccccttcccaagctgccaggcaccatgcagaaaagttcccccagactgacagtatgtacatcagaaaaagtgacatctagatgaagagccagctttcccaccatcttgggttcctttgcagaaaaatcattcctgcctcaatccgtgggaagcagcctgattgcctctagggtaaaaaaatcctgagggcagctagagacaaaggatggaggcggggctagcaaccccagcatgcaaaacacattggctgctcttcatctaagccaaagaagacaccaaatgagagagaatgttcagcccgtggttcctctggacacaaaatcctaaccagatgtctcacccaaccaggatatccagtttgggacctcccccaaatcgggaataggcagtaatccaagccgttgcaagagctgcagcaaatctgggcttacagcaccatctagtgccaaaaaagaggcagtaatctcagagtaaggaagctctaattcatacataacctttagacaggcatactcctgaaaaaccaaactaagccagacacaaagactggaataaataacttagcattcatacaaagacatagatatatgtgcataaaaaacaagagcaaatagggagctatgacctctccaaatggaaacagcatggagccagtgaccaaccctaatgagatggcaaattgtagctctcaaatcaataattcaaaataaaagttctgaggaaactcaaagaacacaaaaaagcaactgagaaatttatgagataaatttaacagagaaatcaaaataataatttaaaaaaccagaaatgctggagctgagaaatacaactgaacggaaaaaaaaaatgcactggaaagtctaaacagcggaactgatcaagcaaaacgaacaatcaatgagctcaaagacaggctatttgaaaatacacagtcaaaggacaaaaaataattaaaaggaatgaagaacacttgcaagatctagaggactgcctcagtagaacaaatctaagagtcatgggccttcaagagagaaagagcaatgaataaaaagctcaaagaaataacagaaaatatttccaaacctacagagagatgtaagtatccagttataggaaggctgaagatcaccaaacagattcaacccaaataagactaccccaaggcatacaataattaaactctcaaaggtcaaagacaaagaggggatcctaaaaagagcaagaaaaaagaagcaaataacatataaaggagctccagttcatccgggaatatactctggaccagatgaacctacctgacattttacagaacattttatccaactactacagaatatacattcttcttatcagcacatggaacattctccaggatagactatatattaggccagaaaacaagtctcaacatttaaaaaaataaaattatattaagtatcttttctgactacagtagaataaaactagaaatcaatgacaagaggaacgtttgaaactatacaaatacatggaaattaaacaacatgctcctgaacaaccaataagtcaatgaagaaattaagaaggaaatttattgaaacaaatgaaaatggaaacaacataccaaaatgaatgggatacaacaaaagcggtactaagagagaagtttatagctataaatgcctacatcaaaaaagaaagactcaaataaacctggtaatgatgtaactcaaggacatagaaaaacaagagcaaaccaaacccaaaattagtagaaggaaaataataataataatcatagaaataaataatattgagaaaaagaaaacaatatgaaagaccaatgaaatttttaaaatggctttttgaaagataaaatttaaaatctttagctagactaaggaaaaaaaatgagagaagacccaaataattgaaatcaaagatgaaaagagtcattaaaactgataacacaaaaatacaaagtttcactagaaactattatgatcaactatatgccaacaaactggaaaaactagaagaaatggataaatttctggacacatacaacttaccaagattgaactatgaggaaatagaaaacttgagcagaccaataactagtaatgagattgaagcagtagtaaaaagtctggcattaaataaaagtccaggacctgatgacttcactgctgaagaaaaacttacaccaattatactgaaactatttaatattgcaaaaaattgaagagaaaagaatgtttccaaactcattctacaagaccagcattatcccaatacccaaaccagacaaagacacaacaacagcaaaaagaaaactacaggccaacttcgctgatgaatatagatgcaaaaatcctcaacaaagtactagcaaactaaattcaacaacacattaaaatgagtatttgtcatgcccaagggggattcatcctaggaacacaaagatagttcaacatatggaaatcaataaatgtgatacaccacattaacagaaggaaagacaaaaaccatatatttatttcaataaatgtcaagaaagcattgaataaaattcaacatcccttcatgataaaaactctcaacaaatttggtttaaaggagcatacctcaaaacagtaaatgttatatatgacaagcccacagctaacattacaccaaatgggaaaaaattgaaagcctttcctctaagatctggaacaagacaagcatgcccactttcatcaattctattaaatgcagtcctggaagtccaagatggagcaattaagcaaagggccttcaaattagaaaaaaagaaatcaaattccccttgtttgtagacgatataatgttatatttagaaaaacctaaacactccaccaaaaaactgttagaactgatcaacaaattcagtagagttgcaagaagcaaaaccaacatacaaaaatcagtagcatttctatataccaagagctaacaatccgagagagaaatcataaaagcattttcattttcaatagctataataaaaataaatatctaggaacaaatttaaccaaagaggtgaaagatctctatactgacaactgtaaaaccctgatgaaaggaattgaagaagacacacaaaaaatgaaaaggtatctatcccatgttcatagaatggaagaattcatattgttaaaatatcaatactactagatttcatgtattacctatcaaaataccaataacatttttcacagaaatagaaaaagcagtcttaaaatttgtacagaaccacaaaagacccagatatggtttggctgtgtccccacccaaatctcatcttgaattgtagttcccataatccccacatgtcgtgggagggacccagtgggaagtgattgggtcatgggggcagttttcccccatgctgttctcgtgatagtgagtgagttctcatgaaatctgatggttttctaagtgtttggcatttcccctgctggcacttattcccactgccaccttgtgaagaagatgccttgcttcccctacgccttccaccatgattgcaagtttcctgagacctccccagcaatgcggaactgtgagtcaattatacctctttcctttatagattacccagtctccagcagttctttatagcagtatgagaacagactaatacagtaaattggtaccgaggtagggggggcactgctataaggatacctgaaaatgtggaagcaactttggaactgtgtaacaggcagaggatggaacagtttggagggctcagaagaagacaggaaaatgtggcaatgtttggaacttcctagagacctggagggctcagaagaagacaggaaaatctgggaaagtttggaacttcctagagaatcattgaatagctttcaccaaaatgctgatagtgatatggacaatgaagttcagactgaggtggtatcagatggagatgacgaacttgttaggaataggaataaaggtggctcttgctatgctttagcaaagagattggcagcattttgcccctgccctagagatctgtggaactttgaacttgagagagatgatttggggtatctggcagaagaaatttctaagcaacaaagcattccagagtgacagagcataaaagtttgaaaagtttgcagcctgatgatgcagtagaaaagacaaacccattttctggggagaaattcaacccagctacagaaatttatataattaacaaggagccaaatgttaatcaccaagataatggggaaaatgtgtccagggcatgttagagaccttcgcagcagcccctcccatcacaggcctggaggcctaggagggaaaaatgctttcgtggcctgggtccagggctcccctgcagtgttcagcctgggacttggtgccctgtgtcccagccactccagctataagaggccaaagtacagcttgggctatagcttcagagggtgcaagcccccagcctttgttctgtgggtgcacagaagacaaaaattgaggtttgggaatgtccacctagatttcagaggatgtatggaaatgcctggatgtccaggcggaggtgtgctgcagaggcagagccctcgtggagaacctctgctagggcagtgaggaaaagaaatgtggggtgggagcccccacacagtcaccactggggcactgcctagtggagctgtgagaagagggccactgtcctccagaccccagaatggtagatccactgagagcttgcaccgtgggcctggaaaagccacaggcactcaatgccagcccatgaaagcagccaggagcagggctgtaccctgcaaagctatgggggtggagcttcccaaggctgtgggagcctgccttttgtatcagggtgacctaaatgtgagacacggagtcaaaggagaacattttggaactttcaggtttaatgactgccctattggatttcagacttgcatggggcctgtagcccctttgttttggccaatttctcccatttggaatgagtgtatttacccaatgcctgtacccctattgtatctaggaaggaactaacttgcttttgattttacaggctcataaacagaagggattttccttgtctcagatgagactttggacttggacttttgggttaaggctggaatgagctaacactttgggggactgttggaaaggcatgattctgtttttaaatgtgaggacatgagatttgggaggggccatgggtggaaacatatggtttggctctgtgtccccacccaaatctcatcttgaattgtagtatattgtttgtaaaaattcctgcctatccagagattttttaaaaaaaaacaatactttcttcaattttctcttacaatttaattttttacatttaactttttaatacttcctgtagactaaaagttattttggtgcattgtgtgaaccaaagatcaaagtagttttatttttttctgaaaacatctattcattttttcaattaattgattgtttatattaaggatctaggaggatctaaaattatggaattgtgggcaagggcaatttttgccttacatttcatgtaaggcaaaataatccccatgtgtcatgggagggacccagtaggaagtgattggatcatgggggcaggttcccccatgctgttctcatgacagtgagtaagttttcatgagatctgatggttttataagcatctggcatttccccttctgtcacctctccctcctgccaccttgtgaaaaaggtgccttgcttccccttcaccttccaccatgattgtaagtttcctgaggcctctccagccatgtggaactgtaagtcaattaaacctctttcctttataaattatgcagtctcaggcagttctttataccagcaggaaaacagactaatacagaccctaaatatccaaagcagtcctgagcaaagagaacaaagctggaggcatgatgctactttatttcaaactatactacaaagctgtagtaaccaaaacagcatggtactggcataaagacagaaacatatgccagtggaacacaacagagaacccagaaatgaatccacacatttagagccaactcatttttgacaaagtgccaagaatatgcattggtgaaagaatagtctcttcaataaatgatgttgggaaaactggatatccacatgcagaagaattaaactaaacccctatctctcactgtatacaaaaattaaatcaaaatggattagagacttaaatatacaacctgaaagtatgaagctactggaagaaaacattggggaaatgctccaggacattggtctgggaaatattttatggcctgggaaatatcaaaagcacagacaactaaagcaaaagtagacaaacgggattatatcaagctataaagcttccgcacaacaaaggaatcaattaacaaagtgaagggacaacctacaggatgggatgaaatatttgcaaactatacaactgagagggtattaataaccagaatatataaggaactcaaacaagtcaatggcaaaaaagcaaaggatcctattaaaaatgaacaaagatctgaataaacatttctcaaaagaaaacatacaaatggccaacaggtatatgaaaaactgctcaacatcactaattaccagataaatgcaaaccaaaagcacaatggatatttcactccagttaaatgacttttatcaaaaagacaaaaaataatgaatgctgatgaggatgtggcaaaaggggaatgcttgtacactattggtgggagtgtgaattagtacagatactatggaaaagagtatgtatgttcctcaagaaactaaaaatagaacgaccatgtgatccagcaatcccactgctggatatatatccaaagacaggaaatcagtgtatcaaagagatagttgcacaccaacatttattacagcaccattcacaatagctaggatataaaatcaacctaagtatacatcaacagatgaatggataaagactgtgtggtatatatacacaatagactattactcagccattaaaaagaatgaaatcctgtcatttgtggcaacatcgatgagcctggatgtcactgtgttaagtgaaataagccaggcatagaaagacaaatatcacgttttcacttacatgtgagagcttaaaaagtggatctcacggagatagagagtagaatggtgcttaaaggagtttgggaatggtatgggggggtgggatggaatgaagagaggttgattaataggtgtaaaatgaaggggtggcctgcccctcgtcacccacagtgacgagaaacactgtgggtgtttctcgtcaggtgggacgagagactgagaaaagaaataagacacagagacaaagcacaggaaagaaaagtgggcccaggggaccggcgctcagcatacggaggacccgcgccggcactggtctctcagttccctcagtatttattgatcattatctctaccatctcggagagggggatgtggcagaacaatagggtaatagtggagagagggtcagcaggaaaacatgtgaacaaaggtctctgtgtcataaataagtttaaggaaatgtgctgtgccctgatgtgcacgtatacaaacatcttggtgcattaaagagcagtattgccactagcctgtctcacctccagccttaaggcggttttctcttttctcagtaaatagaacatacaatcgggttttacaccgagacactccattgcccagggacgagcaggagacagatgccttcctcttatctcaactgcaaagaggacttcctctttcactaatcctcctcagcacagaccctttacgggtgtcgggctgggggacggtcaggtctttcccttcccacgaggccatatctcaggctatcacatggggagaaaccttggacaatacctggctttccagggcagaggtccctgcggccttccgcagtgtattgtgtccctgggtacttgagattagagaatggtgatgactttttttattattattattatactttaagttctagggtacatgtgcacaacgtgcaggtttgttacacgtgtatacatgcaccatgttggtgtgctgcacccactaactcgtcatttacattaggtatatctcccaatgctatccctccccccaccccatgacaggccccggtgtgtgatgttccccctcctgtgtccaagtgttctcattgttcaattcccacctatgactaagaacatgcggtgtttggttttttgtccttgtgatagtttgctgagaatgatggtttccagattcatccatgtccctgcaaaggacatgaactcatccttttttatggctgcatagtattccatggacaagcatactgccttcaagcacttttttaacaaagcacatcctgcatagccctaaatccattaaaccttgactcaacaccgcacatgtctctgcgagcacagggttggggctagggttacagattaacagcatctcaaggcagaagaatttttcttagtacagaccaaaatggagtctcttatgtctacttctttctacatagacacagtaacagtctgatctctctttcttttccccacagtaaaattacacttaaatagaagggataagttgtagtgttcgatattacagtagggtgactatagttaacaatgatttattgtatgtttcaaaatagctagaagagaagactgggaatgttcccaacacaaataaatgacaaatggttgaagtgattgatattccaattaccatcatttgattattacacattgtattcatgtatcaaaatatcacatgtatccccaaaacatgtacaattatcgtgtatcaatttaaaaatacatcatgataggcacctctcaggttgactgtactgtcctgattattgctagtggtgttaacaaatttgaagctagtatctttaagaacgggcagacccatgagcatgcccttctggtttacacactggaagtgaaacaactaattgttggtgttaaaaaatggatttcactgaactatgccatcgccaacagagctatgtggaaatcaataaggaagtcagccctacattaagaatactggctacaaccgcaacacagtagtatttatgccaatttctggttggaatgctgacaacttgctaacatgccttggttaaagggtggagagtcacctgcagagatggcaataccagtgtagcacaccgcttgaagctctggattatatcataccaccagctcatccaactgacaaggcttgtgcctacctctccaggaagtctacaaaattggtagtattggtaatgtctttgtgggcctagtggtgactggtgccctcaaacccagcatgattggtcagctttgctccagttaacattacaactgaaataaagtcttttgaattgcaccatgaagctttaaatgaagctcttcttggggacaatgtgggcttcagtgtcaagaatgtgtctgtcaaagatgtttatcatggcaatatggcttgtgacagcgaaaatgactcgccaacggaagcagctggcttcctgaaccatccagcccaaatcagtgctggctctccacctctgttggattgtcacacagctcacattgcttgcaggtttgctgagctgaaggtggttgatttccttctggttagaagctggaagatgacccccattgtgatttttattgctatggtttctttctaatttagtcttgaggtctctcccttgagaatggtcataagccaagagagccactttctaggagagtcctgaccagggggaaagttaagtttgagtgtgtcagcttggtgagacacaatgaggaagtaaaaacaaaataaatagtggaatagaatactaacaagtacctagaaataagtctagctaaaaatttgcaaaatgtctatggaaaaaaaaactatggaaatttactgagaaactttaaagagtacctaaataactttcaagatataccacgtacatgaattggaaaacatgatatttgaaaatgtcggttattcccaaactgatttatagattcagtgcaacctgaatgaaaatcccaagacgttccttttgtagagctcaacaagctgattctaaaattaatatgaaaatgtaaaggtttatgaatagccaagtccttcttgaagaggaagaataagatgagagtaattgctgtctaatatattgagacttattttaaagctataataattaaaacaatgtagcagttggtatagggataatcaaacaggtaaatgaaatagaatagaaaatccaaaactagtctaacacatatagaaacttgatttatgacaaaggtgtcacagaagtagagtttcaataaaatgctggaaaatgttggtatctatatagataaaacattacattggattcctaactcacaccatacacaaaaatccattcacattgcattacaagtctaaaagtgaaatataaaatcataaacattttagaaagaaaatgtaaaagaatatatcaataaccacagggtagggaaagaaagagaattgacatcaagatacaaaaagccctagccaataaggtttttttttataaattccacacattaaaattacaaacttatgctcatcaaaagataacataaaaacaatgaaaagattagccacggaatggtaaatgtttgcaatacataacacaaaggacacacaaaggaaacttatataatagattttaacaggcttctctgtgtccttcttctccagcaatcaaggaatatataaaaaagcatatcaaggatatatagggtactcttttgattcaacaagaaaaaagcagattatccaagagaaaacttggcagaaaaaagcttggataggtgctccacaaaagaggacatccaaatgactgctactcataagaaaagatgctcaacctcatagaacatccaaaaatgtaaaaacacagtcaataccagatatttgtaataatttggagcaaatggaactctcatacattgctaatgaaaatggaaaatggtccagctgctttggaaaacagtgtggcaatacctaccaaagccaaacacatgcatacctagtaattccgcccaacagaaatgcacatatatgttcaccaaaagatatgcaccagaaggttatagcaggtccatatgaaagtgccaaagattataacaactcaaatgtccgtgattagggtatattcatataatactatacaacaatgggaatgaacaaactatagctacatatgataatatagatgaatctcacaaccagaatgctaagtgaaagaagaaacaaaagaatatatgtagtatgttttatttacacacttcaaaacaggcaaaactaaactatatttttaaaggatgtatacgtaactggtaaaattataaagaaaagcaaagaaatgattatcataaagatcagaatggtggttaccttcagtgggaagggagaaagtatgattgaaaagggacatccagtgagtcttgtgggttgttggcaatgttactgatctgggtgatgattgcatttatgtaccaaaggcatttgtgttttatgcactttattgtatatgttttagttcacaatttttttagttcacaattttaatagggctttaaaaagtaaaaagaaaagagatccaagggcttgaccatgggactctcttatatttggagtatgtttataaactttacattcattcaacattcgacaaatattttttgagcacctactttgtgccaagcaccgttacaggtgctgggaatacaacagggaacaaaacagacaaaaccccagctttcatggaacttacatgctaataaagcttggcaagagtatttcaaggaagatgaagtggttaactatgcaaaatgcttctcaggcacctaggaaaatgaggatgtgaggcatttctacccacttggtacataaaattattgcttttcctctgctttttttctccagggctcagagtggcagtgtccctcagttcaagaaagttgttttccaggaatttactgatggctcctttactcagcccttataccgtggagaactaaatgaacatttgggactcctggggccatatataagagcagaagttgaagataatatcatggtgagttaaggacagtggaattacaagaaaattaattttatatatttattttcttgctgactataatgtattcccacttttggaaatttttaaagtatagaaaaataattccataattatctttgtgtacgttctatttttcctatgtatttttctccttatgtattcaaattataccatgcagaattctgattcttgtttttttactaaatatcacatcataaacatttcttacgtcattaaaaacacttcctatgtatgtttttaaaatactgcataatagtctattatatgaatttatggaaccatagtttatgtaaccatttattttgaacaagcttttagacagtttcttttttcactatataaataacgctgtaatcacaacagtttttctaagataaaattccagaagtgcaatgtatttgagcatcttaagagtttttcttattaattatttggtaatgtcccttgcacatttgtctttcatggaggaagtgcttttcttattgattatgttaccttatatattagatagtaaaccactgaacattttaatgagaggtactttttcaagtttttgttttctcttaattttataaatgatggtttttgaaataaaacaggttttaatttttaggtagtaacccatcaatctttactttttgacactttcattgcttttatgtttataaaaattcctgcctatccagagattttttaaaaaacacctatactttcctcagtttttctcttacagtttaattttttacatttaactttttaatacttcctgtagactaaaagttattttggtgcattgtgtgaaccaaagatcaaagtagttttatttttttctgaaaatatctattcgttgtttcaattaattgatggtgtatattaaggatgtagaaggatctaaaattatggaattgtgggcaatttttgccttacattttattttactttccattatattctatgataaatatgtataatttttaatctggaaagtaagccttttttaaaagataatatgcattcattctagaatttgtcatgaagaaccttaacttacatatcaactcctggcgttatggtctcttataacccctgcagtaacattttcccttttactctggaatggcttttatgtgtttaggaattttctcctttgcaactttgagttcataccttaaatttagaatacaaaacctcctcaggattaggtttgagttctaacagcatccatcttctgtaccacttcttccagggtattaaaaactttgataaagaccaaaagacaggtatttcttttagggatgtaaaccctaaggaccttaagatcctagaagattattcttgcttttttttttttgtcgttattgttctacaggtaactttcagaaatcaggcctctcgtccctattccttctattctagccttatttcttatgaggaagatcagaggcaaggagcagaacctagaaaaaactttgtcaagcctaatgaaaccaaaacttacttttggaaagtgcaacatcatatggcacccactaaagatgagtttgactgcaaagcctgggcttatttctctgatgttgacctggtaagcaggtgtctattgtgctgaccactttttggtttaaaagaaatggtctttgtgtactaagaattttgatatttatcctacgtgcaataagaagctttaaataggagagttgatcattatatttgtgttttagaaatgtcattctggaatctactgaagaggatggattatatttttggaaggtgggaggcaggttggactggcataaaaattgatgagaaatccactctggttcataggtgagagagcttatactcataggattgatgtcttccctccctaggaaaaagatgtgcactcaggcctgattggaccccttctggtctgccacactaacacactgaaccctgctcatgggagacaagtgacagtacaggaatttgctctgtttttcaccatctttgatgagaccaaaagctggtacttcactgaaaatatggaaagaaactgcagggctccctgcaatatccagatggaagatcccacttttaaagagaattatcgcttccatggtaatatattccacatccaaacattatcactgtgaaatgcagattgcactttgacaaatgagacttgatccagggacttgaacattgtatttatttagagtatatctgtgggagtggaatcctcatagatgtcagtttttttggtggagtggagagaaagaaacttatataatagattttaacaggcttctctgtgtccttctccagcaatcaatggctacataatggatacactacctggcttagtaatggctcaggatcaaaggattcgatggtatctgctcagcatgggcagcaatgaaaacatccattctattcatttcagtggacatgtgttcactgtacgaaaaaaagaggagtataaaatggcactgtacaatctctatccaggtatgagcttgtttgtgctctttcttctacctactctatttgttgagtacttactttaaatggtctaggcactgggaacacaatcagtgatcaaagcagacaagctccatgctcttaagtaatactttttcaaatgctttttaaaccatttgttcaaagcaaatgaacaagataatttcagatatagaaaaattgctaaaaaggaaatagaacagaataaatggataattaatgtcacagtactttcctagggaaaaggaatttattcctttatcatttaccatctcaaatcccatagggcaccagtagtcatccaaagagtcatttgtttatgtatgtaaccagtatattgattaagcactactcataatgttgatcacaacacaattttattttggttcttcactgtccctttaaaatagatttggccaggtgcgatggctcacacttgtaatcccagcactttgggaggccaaggttggaggattgcttgaggccaggagttcaagaccagcctgggtgacaaagcaagacccccatctctacaaaaaataattagccagacatgtggtatatacctgtagtcccagctacttcacctacttgggtggctgaagtggaaggattgcttgagcccaggaggttgatgctgcagtgagctatgaaagtgccactgcactcaaacttggacaacagagcaagaccctgtctctaaaaaaaaaaaaccatccagtttaatagcgggggtaaactttccttatttcttcgtaaaaattctgataagccctgtaacttttctgctcacccttaagtaataaacaggactaaagtcactttatgtcacaaatacagttcaaatcagaaattacaatgtccatcccaagatattaatcaaaattgtaaacttgatttaacttcaatctcccctcctccaacttgagcctgcatcaggctggaagtctgcattggaaaagggagacatggttgagtcctctgtttctgtaccttgtgatgatcgtgcttccccacaacccctttatagctgctgttttgaactccaacatggataggttaaaggtaaggggataagatagttcttacctatttacagctggcaccattgttgtaaactagcttaacactgtttgtgcctggcaatacttgttgactctttctcctgcagggcactttcagggaactctttagagactcccttacgtgactgtcatgaaatccccttgacatgatttcttccacctttactctgggtggtcacttgtgactcatttctcagccctcagtgttcacctgcagcttcttgttgctggggtaactttacccttgtaggcagctctagtggactggatccagagggaactcaccctgacttatctgtttcacagagtccacatctggccaatgggaaacacaccttttgctcagaaagaccctgggaatgtaggtcaatcataatgcagtagcattctcctgtcccaaccatcaaagaattcagtcaccctgtttctcatctcctggggggaggggagtggtcagaactcaatctccacaacccccaactgtaagggtcacgtagcaagcactttgcatttgaggggtccaaaagtagtggaactaccaaatttggtaggtctactctgatatttcgcataaaccaatgtatctcatgctcattttttagtgaaaagaaataatttctgttcctgttggtttttataaggtgtttttgagacagtggaaatgttaccatccaaagctggaatttggcgggtggaatgccttattggcgagcatctacatgctgggatgagcacactttttctggtgtacagcaatagtgagtagcaatgtgggcagaggttccctacctactcagcctacttctttacagctttcttcctttctggaatggttgcttgtgtcaggaaataaatacaagtttacatcattatcaaatttaaaatgaatattgctggtagaaatcatcagagttctcagagtagggcagatatacttgaagctttgaacactttgtacctgaagctctaaataattgacaaaaaaaaaataccacctcattttcacaacttggtaaagctcgaagatctccagtagcagattttggaatttaatgttgatttagttaccagataacttagaaatactacttggaagagtttggagatttaaccctaaacaagtaagagagccactggtctatttatgtacggaccccagtttcttcagctgtaaaatgtgaatcattctagcacctgttaggattaattaaatgaactaatacagtaaaacgttgagtacagttcttggcacatttaaacactaaaaaatagcatttgttgacgttctcccattttcattgacttacatttgagaagctgaattttgtgcacttctagttactgtgttccacccgtttcatttcagagtgtcagactcccctgggaatggcttctggacacattagagattttcagattacagcttcaggacaatatggtaaatactattatttttgctccaagaacctgggctgattatatctttttttaataatctggtggagaatctcagataatgaatccatctccatgcttctattagttctattccataagtgcctctcaaatacatctcctcctctccacttcccactgtggccatcttaactcaggtcaccatcatttcttacctgggcaatgacactgcctccttaaatatcctccctaccttcagtatttcttccttgagtcaattcttttcagtgcagcaggaagctatactttcctatgagcagtaatggtaaagtttgactagggtctatagagaattctcagaaattgttttagagcactactgcccacaggctaaatgcagcacactgcctgtttttgtatggcatgtgagctatgaacagattttccatttttaaataattgtcaaaaagatgaagactatttcatgacatgtgaaattataaaattcaaatttcagcatccgtaataaagccttattttggaacacagccacgtccattaatttacatatcatctatggctacagcagcagtaacatagttgcaacagagaccatataatatgcaaagcctaaatgatttactatctggccctttacagaaaaagtttgccaacctatgttgttgtgaggtaaaaaaaaatcctcttgaaaaggaggcgtgagagttttacaccaaaatagtaacatttttcactaggtggaagggttacattttaaaatgtcttttatttgtatttttactaatttttacttttcattttctgatttttctacaatgaacatacattgcgtaataaataataggcggggcacgttggctcatgcctcccagcactttgcaaggctgaggcaagcagatcacctgaggtcaggagttcaagaccagcctggccaacatggtgaaactccgtctctactaaaaatacaaaaattagtcgggcatggtggtacgcgattgtagtcccagctacctaggagactgaggcaggagaattgcttgaactcaggaggtggaggttgcagtgagccaagatcatgccattgcactccagcctgggtgacaaagcaagactccatctcaaaaaaagaaagaaaagaagaaataatattattatttggtagtgttggtaacaaattgcagtatcagctagttagaggtgctaacaattaacaaaattataaattttagaaaataaaatggacaacaaggataagcaatatccttagatagtaattgatactggtatgccataaagcctttatgtttttctctattttcaccacagcttagattaacctttctcaagacaataattttattctcaagtgtctaggactaacccagctgaatttaatctctgtttctttacttgggcaaaggacagtgggccccaaagctggccagacttcattattccggatcaatcaatgcctggagcaccaaggagcccttttcttggatcaaggttagaaaatgtaatcaatgatgggaaatgtatcacattcaatcaattgcattacttattcctcttgcaagctcaaaggattctatgaatatgagaaaactaaagaacagaatgccttaatgatttgtacaaaagcagtcatgaacaaagagatatggggatagaattgagtatattgatatgtcctgtttctgtattttagtccttctactgggattagaacatctgaatattttctataatattgaactcgtcatctctcaagacagtatatgttattattagatgcttccaactgcccacgtgtccttaagtactccaatcccctttattttaacataaaacaaatggttcacaaatgcaaaccacatgtgtacttttacattttctgtagccacgttttcaaaaatgtgaaattcactttaataatacattttatttaactcaacatatctgaaaatactatcatttcaacatatgatcaatgaggccccttcaaagacagacagatggaaactcttgggtctcttccatgcctcacaaaagctgagggcagcttggaagtgcctgctcagcctctccacctaaacataaggctagatgccttctagaagcccaaacaggaaatggagaaaacattttggtttccatctttgcaaatagcatgtctattaatgccacagcattgttttgtagacactgccaattttgactcaatctgagctgctgttcactaatccctaagtattttttgttggtttgtgcttctgccaaacaacatgttatgttcttcaccttgtatttctatggttattttcaaccttaagtgtatccctatatagagaacatgtttatctatttggccaccctgtgtctgtctgtgctatttaattttttgtaataacattcttatttgggagggcggaattatatcttcctcactagatacaacctgataagactagtaaatagagtgtcctgtctgtgcctagccaatgaaccctgaatgatatactctgttgtttccacttactagatttggcccattgtttcagcttgccgatcttcagtgtcccaaagtatttcctagtttttccagttactgatttgatcagtaaactttctaatactgcagcaaagtcatgatcaaaatattgaagtagacaagacttccttagtatgtgcacaatacaaatcaagctgttaagtccttactacaaccttgtgaggtagatgttactatcatcttcatttcagataatgaaattgaagcatagagaggttattgtggcccaagtcacatggctaataagtgactgagccaaaattcaaattctgatagttgggctccagaaccctaactggtaatcgttgtactacactgtttccggaatgctccctttaagttgataaccatctattaactgtcactgttcacttgtggtaattaaaccagttacaaatccacctagttatgttatcatctaccactattgaatcgccttatcttcaaggtggttttgccatctgtcctactaaggtccagctagactttttatagatctcgtaactttataaaataaaccatggagatggagttgaaagggggtgctgacaaggaagggagttggagaaggcatctattctcgtgagaaggcctgaagagtgcacaacagcctggccccaagacacaagagcactgggctggcttgaggagcaccaggtgaccaagaccaggcaatgcacagggggaagtcagcaggccccatggagatacgcagctgcagtgtttgtacttttatacagtgaaactcattaccaccttgcttacttcctagtagagagatgtgtcttgtagttacactgaaacacctggctgggcacataggtgaagctgttgagtctgtaattgtcaaactgctcccaggtgccaattataatgtagaagaggcacaagaagatgaagtggataagcctggcagtttgtcaagcattcatcagttgtcaagcatttgtcagttgcagaatgtaggtaggctgccaaggctttattgtagcctggttctattgcagctttattctagcaaggctgctggaaaatacaataatcactggtccaagaaagaactcttatactctatctatatgaagaaacagtaaaagtcaattcagtagaaatcatgatttttgtgcctggtgctttcacttttttatgccacaataccaagaggttaaaatgaagtgtctttgattgggaataccatctatctgggaaaagacagggctgcaacttctgaagaccttgacactctgtcctgttaccctgcttcatttttctcctgcgcttatcactacttgatgctataaacaaataaaaacatatatgatataaggtctatttctcctactcaactgtaagttccatgagggcagggctttctttcttgtttactactctattccctgtatctaaaacagtgcttggcacatagcaagtgctaaaaaatattctttgaatgagtgtatgaatggaacttacagtcagctgaaggagacagttattaagcataagagtgatgaccagtccaattgtgtgtgtcaggcatgtgtgaaaacgtgctaaatttgacttgcttattaggacagtaactgatacttctaatgttcttgcagcccatgacctcttctttaagaagtgtccattctgtactactttcccattattcactcattcattccaaagcatttgctatacagcagtattataccagataccatattaggtgctggggctagagagaatataaaagctaacattgattgagtgtttagtatgcgccaggccctgaactcagcacattacatgtattaactctttaacccctatggcagccctttgagataaaaactaatattatcttcactttacagataagttgagacacagaaagttaggtgactcaaatgggttcactgccttaaggatctcagtctaataaggaaagcagaaaagcaaagcaaccttataatatggtgcaataatttgctataatgaagttatatacaaagtgaagtagaagcatagaagaagcagcactaaatttgtctgggtgagtcagagaaggctaaccaggaaaaatagtttctgaactaacacttgaaggaggtgtagcagttcatcactgacagtgatgttggggtgggtctggtttcaggagaggggaggaaattggctttggtctgaggctgaggtgtgggcaaagcattagcttatgtgggtccattagcttatgtgagtccacaaaaggtgtgtgtgtgtttgtgtgtatgtgtgtgtgtgtgtgtgtgtgtgtgtgtgtacgaaatgggggctcaatgatttggtagtggtttggtttgtcaagaagcaggctgggaactcaataagcatctttccattcatttctactgtgtatcccacagcttcacacacacatgcacatttcaacattggtgactgcttcacttgcacacctaaggtaatgatggacacacctgtagcaatgtagattcttcctaagctaataattagtttcaggaggtagcacatacatttaaaaataggttaaaataaagtgttattttaattggtaggtggatctgttggcaccaatgattattcacggcatcaagacccagggtgcccgtcagaagttctccagcctctacatctctcagtttatcatcatgtatagtcttgatgggaagaagtggcagacttatcgaggaaattccactggaaccttaatggtatgtaattagtcatttaaagggaatgcctgaatactttaaagaattttggcagatttcagatattggacaaacactcttagcttccacaaacttaattccaaaaaataatttttcacttatgagcaatagagttattacggacatatcagcaaaaatgtagtagtgtcaaggctcatagatgatagaaatgaagagatgctgtattgatagaaatatgtgattcaggactgtgtggattgatgattgtgagcttgcttatggatatcctaggtttgaggttatagtaggacaatcaggttgaaatgtccagcaggcagtaggtgaaagacaagtttagggggcaaaaccatggatggagatgaagattcatgacttccacataaaaggatgggtgaaactttgggaattgatgaattctctagaggtgagctcaagacccttaaaggcttaaaacctcagcgttattgtctactcttccctcatttttatgcccacaaatctggtcaatcctttatttgcaatgcctctcacatctctttcttctgtttccatttataccgctgttgccacagcccagggtcccatcacctcacacttgatctattgtattacattcctaactagtcttcccccgtttctaatctgttctccgataaaagctgcacatcattttcaggataatcatcagtcgcctgcctaaaacttttcaatgtcttcccattgtctttagaataaagttcaaagtcttcaaatgaccccaagcaagataacttttgtttgcccctttagatccattttcctgcttctctaccctgcttcttgttctgtgaggtgagcttgtatagaatacatcaacaggttaccttgtcctccagcttttggttggatttcaccaacagggagcactggcaaaagattggcatatttattcttctgactttctccttgcagaggagttcactgtatctccccacttaaggtcactgtttccctcagagtggctttttctacctgtactagctactattgctgtgtaccaagccacttcaaaacttgctgtcataacaataaccattatgttttgctcacagattctgtagatcaagactgggacacagtggggatgggtggtttctggagcctcagttaggattatttaacagctgggtgctggaatcatctggaagttccttctcttgcttttctggtggttggtactgactgtcagctaggacagaatctggggttgttgactgatgtaactttacatggattatccctgaggcctggccttccttacagcatgtttcaaggtagttggacttctttttgagggggggtaggaaggtggggggaggacagagtctcactctgttgcccaggctggagtgcactggtgtgatctcggctcactgcaacctctgcctcccgggctcaagtgattctcctgcctcagcctgctgagtagctgggactacgggctcatgccaccacacccagctaatttttgtatttttagtagagacagggttttgccatgttgaccaggctggtcttgaactcctgacctcaggtgatccgcccacctcagcctcccaaagtgctgggattacaggcacccggcctgtagttggacttcttacacgtcattttagggcctccaagtgtgagtgttacagttaacaaggtgaagactacataaccttttctgaccgagtcttctaagttatgtagcatcacttttgttgacaaaaagtgttgaactctataaaatatttgaagagatttattctgagccaaatatgagtgagtatggcccatgacacagccctcaggaggtcctgagaacatgtgcccaagatggtcagggcacagcttggttttatacattttagagaggcttgagacatcaatcaaatacatttaagaaatacactgatttggtccagaaaggcgggacaactcaacctgggggcttccgggctataggtgaatttaaacattttctggttgacaattggttgagtttgtctgaagacctgggattgatagaaagggaatgttcaggttaagataaacattgtggagaccaaagttcttttgaagtcttatagtggctccccttagagacaatagatgacaaatgttttgtattcagatcttagttaatctctttaggattgggaggggctgggagaaaaagatctagctatgttaatagagattctttacagttgcaaatttccctccacaaagaacagctttgcagggccatttcaaaatatggcaaaaaaacatgttttggggtaaaatattttgattttcttccttgtctcataatgttatgccagagtaaggttggaaagtaaatcatgacatataaggttaaataaaacccatctgatgagaatttatgatttgtagggcatgactccccagaccccttagataggaatttgggcaagataaaaaaaaatcagagtttagtcctcactttcaatacattctattggttataagcaaatcgcatatccacccagattcaaggggaagagacatagaccctaatttttaatgggagaaatgttaaataattggtggtcattttttaaagccactacaataatctatccaattctctctttcaggatgtttctctcttctgatcctttcaggtttagggattgtcaacaaacaaaaagttaaaccctgtaaaatacttgaagagatttattatgagccaaatatgagagaccaatggcctgtgacacagccctcaggagatcctgagaacatgtgctcaaggtggtctggctacaacttggttttacgcattttagggagacataagaccgaaatcaatagatggaagatgtacattcattgagtttggaaaggcaggacaactggaagcgaggcggggcttccaggtcgtaggtagattcaaagattttctgattggcaattggttgaaagagttaagttattgtgtaaagacttagaatcaatagagaggaacatcggggttaagataaggggttgtgaagaccaaggttctgtcatgcagatgaagcctccaggtagcaggcttcagagagaatagattgtaaatgtttcttatcagacttaaagagtctgttctatcagtctgaaggtctgtgttgatgttaatgctggtcagatttttctgaattccaaaagggaggcgggtataataaggcatatttgatccccactttcccatcatggcctgaacgtttttcaggttaactttggaaggccctttgccgaaaggaggggggattagaattttattttgggtttacaggatggtaatactctgttcccaccctcctaactagtatctttattaaaccttccacaaattatcctaatttccatgttttctgttccttgctggatcccttgtttcatacagtaattggtgctagaagaaaccccaggaaacagattttcaaaatgcaattctaaggttatgttgctaatatattcaagaaacacagagataacatatttgccaaggaagaaaatgagcagttagggaatccatgacatgtgttagtattatagtttctcagattatcaccagtgatactatgggatgagttgcagatggcaagtaagacactggggagattaaatgacagtggcatttagtcactgtggcaacaaacgtagcattacctgattgtagagtggtctgtcttcttacagccctagagggcatacacatggaaaaagaaatgaaatgttatgaatatatacaaaataagaacactgatgaacatacatggaaaatcaggatgcatgcatagagcttttgaggaatactccgtatcctgtggttgtaggcagatacgacttaggggctgagcataagttgcagagctgcagtgacaattaaatgcttaactccaccagatctattatgctgtggtaagagtaccggtgggaaggagtgaaactctgaggcctgagatggaggcatttaggcagacatggatgaggctgagaattgcaaacctccaaattcccctgaacctcctttgcctgaggaggcaaccactccccagtctctgaagcagtcatccctcttttgtgtaaaagcctttcagtggctataactgagataggtgcctcacaaaccagtgactattctccttagagaccctgtttggacactacgaaagccaggcgagtcacagaaaatgacagcagatcacaaatttaatcaggtggtgatgccaaaaaacaattgcaattccagatatcatatctctgttgaagcaaatttacacagccccaggcacctgatatggaagtattgacctagagaatgttttttcttcatttccatacattagtaaaatcagaatacatttgaatttaccaagtaggaacaagagtattaagtttactgcccatgcatcagggcaatgttagctctcttgttttctatcataatatagactcaagggacctcaaacatctttacatcccacaagcacaatgcctgtccattacactgatgacattatgctgacaggatctggtaaacacataacaaataagcctgtcttgctcttgactttaatgagaatgtaacctgtgtttcactgtttaatataatgttcactgttagtttcaaatactttttatgatgtttaaaaagttttctcctatccctattttatttgcaatggcaactgaattttatcaaatgcttttccagcatctttgacatggtcacatttctcttttgtgttgtcaaattatacttaacattcaatagtgtgctgacaagaaattaacaacccacaggggagcaaagtgagaagaggttaagaagtaaaggccttgatttatagcattggcagatttccctgacataaatactactcccatcatgcctggccccagggatgggaagagatgcttacttacaattggctctcacagaccagtgcaagagcactactgtgctccatttctgggaaaactttcgtcagtcatagtgtgttagttatttaaaacttagctggatccaatttgccaacatttcatttataatttctatatctatattcatgaatgaaatgggtttagctttttcagtagctctacttaccaggttttggcatgagggttatattaaacttgaaaataaagtgggaaagcttccatttttttccatgaagactattgctctagaatagcttatttaatgtaggaatccagtatttaatgagagtaaatgaaaaagccatatgagccatgtgctttatttagtgagagatactaggctatattttccaatcgttatatgattattgctattctcatttgtgttgccttgagttaatgtctgcaaatgtgcacattagagtcatatatcccttcctgtgccatacatctatatctgtatacacacatatgtcttttctccttttttcccttctgtatcaagagttggcaagtgtttgtctattctattaatttttcaaagaatcagctcagttttaaacccaaacgtggttttgaaagagctgtttctagttcatcaatctctgttcaaaactttaaaaattctattttcctttcttttggtttgtttcctacaatctggaggtgaatgcttagttcacttattcttcaatctttgtattttaacgataaggataaattacttacagttattaactactctcatgaggttcattccttgaacagtcactgagcaactactatgtcctgggttctaattcaggggtgggcaaactatagccccagaatttggcccatagcctgcttttgtacggactgtgagttaagaatagtttttacacgttgaaaggattgcaaagacaaacatacaaagaaacaaagaagactgtgcaacagagaccacctgtggtctgtaaagactaacacatttctatcccgcccttgacagaaagagtctgtgggctgctggtctcctctaacggtggtagagatgcctgcacggttaacattaatccttggcaccagaatcctcagcacctaggaaccagatcttgcctaacacgctaatttcagtcttgaccaccttcctccggcgtagcggttctcaaacgtctttgtctttgtactattcacgtataaaatattctttcataagcaacatttatccttttgggaatacctcacaatggggagaaggggaaccccaacagcctttaagggttcactgcttcgctgccaccatttccgacggtttacactgttttaagtgtgaatttggaattgttttcaagttaaaaagcaaactaatcatgtcctctgaaagtatttgcttttggcatgctagaaatcagtgttgacttttgatactgatgtgatacattacgagggaattctcaaaactgctgaaatctggcctcggcccagttatcactgctcttaagcttctgagggagatacatgaatgagcccacggcaaatggaaaacgaggagttttagtgtttcctagaattatgctcagatacccactacctgaccgtctggttatccttcccctcacctccctgacgcaaggagtttggaccagaggcctaaggaggcttctcctgaagcccaaatcccaaactggtcaccagtcatgctccgtaactcctgaacctgacaagaagccagccggccaggtctgcagcccgggttaagaggagcataccaggaaagagccaaagagcaaaggagcatgagcccttcaaccgcttttacaataatttgggctaggcgttcagggctccgtaggacccttcctggcagccaagtgagagaaagaggaatgatggtggaatgggcctctcctgtgcttcccattacttccacactgtcgaaatagaaatagaagcagaaaagaacaccctacaagtcccacccatttggaggcactcaactcacagtgacaaccctccacacctctcccctgcaaaaagacgcaaaacaaaaacacctactccaaactgtgtccttacatctcagccccgaagatcaggattgtgtgcaacttcggcccaaaggatgcatttccccagggttgaaagtttgagaaagaggctatattctgaagagttcttgttgtcaccatcaaaaggattaaaaagacgcaataaataagaaaacagcgtagttggggggcatgctccatttgagccagaaagccttggaaacttaagtgttctcaaacggaacgccatcctgctttgggggaacacggaggctgccttgcagtcacgtgatcgcacaacaccaaagggccacgcactctgatttcacctacttaactaaaagttgcagcaaaatccctattacaggccaggcgtggtggctcatgcctgtaatcccagcactttgggaggccgaggagggtggatcatttgaggtcaggagttggagaccagcttggccaacatggtgagaccccatctctattaaaaatacaaaaattagcccagcgtggtggtgcacgcctgtaatcccaggcaccctggaggttgaggtaggagaatcgcttgaacccaggaggcggaggttgcagtgagccgagatcacgccactgcgctcctgcctgggcgacagagtgagactccatctcggggggaaaaaaaaaaaaaaaaaaaaaaaaaatccctattacaaataaaagctgttgtgatccagactgcatatacctctgcgaatggaaccagaaccgtgaattccaatgcaaatcgatgcatcggcaccagacccgctgcactggatgtatctgcattgcagtcacccgagtacggagcacatcatagatgatctctgcaggttcgttgcccacataggaggcatagcgcaaatttcaaaggaacgaatacatcctggagcccaaacagctatctggttctgctgctggcctcctgacaagtaggtaagagagtcacattttatagacgacggacaccaaaaccacacatgaggagtacaagagtagctttatcatggatttagggctgtggttacaaggaagctgtaaggaataaaatgactcccatgaagacgtaccgtgcggacgagtggaaggagaaatttggccattacaaagacacaggaatatgttaagaagtgaggggcaggatgaaatcatctagggtaggtatttagagggagggcgccgtgcaaaataaaatcctcactatgaaacaaaggcggaggcaggaggctgcgttaggtggaagcagcggaggaaggagacgaaagggattgtcattttcatgtcgtggctttttagaagacagccatgtcctctactctgattctatcaaaatgtgttctcggggtgctggtaacgttcagccaacgaaataattcctatggcggcagtaggaataacaaaacgcagaagcgggaacgatgtctttttattcctccccagacgcaaacgtggatgcatgaggtttggtaacaggcaaagtcatctggttaacgtgactgatgcaaaaagtccaggcctgggcaaaaagaagtcactgggtgaatgggatggatcagactccctgtcctgagggggagatggtttcttgcagaacgaggtgaaggaggtggttctgctcagcagtcaacagtggccacatctccacctgcagcgacttgatggcttccgtgtccttttcgtgggtagccatgaccaaagactggagcagcagaaagagctcctcgggaagctggccgctgctctcctgcccgtggctgtcaaaagcctcccaggagtacttctccagggtctgggcgtgctccggcagcagcttggcgggcggtggttgcaggaggagcagcagcagcacgcgggacacctcgcagcggaccagcacgtccgagaaggcgcccagggcggcgggagagggcgccgccgagccggagttcggaggaagcagcgcggccggtagggcgggcgtcgccccgggcccgggctggggtgccggcggcgggggcggcggcagtgactgcaccgggtggctgccgtgctcccgcgccaggcgctgcatgcgcgtgaagaccgccagggcgccggtgtagtcgcgcgccagcagctggcaggaggcggcctcgccaagcgcctgcagcgcggccaggggcagctggggcagctggagctgggcggcgcgctggaagtgaccggcggcggcggccggctggcccaggtcgcgcagggcggcggccagctcgaggcagagggcggcggcggcggccggctggcccagctcgaggtgcagacgcaccgcggcgcccagggcgctggcggcggcctgcagcggctccccgtaggcggcggggcagaccaggcgctggcgcgcgtcgcgctcctgccgcaggaagaggcgggcggcctcggtgagggccagcgcctccccgggcccgtggaagagcgcctgctggcagcgcgccaccgccagctggcaccaggccgcgtagggcagacactcctgggcgcgcagctcccggcccagctgtccgaactgctcgccggcctccgccacgttcggcttccgcaggaaccgcttcttcagcttgttcgataccagccggtagcgggccaggaagtccccggcctcgggtcccgggccggcgccgccgccgcccaggcctgcagccgctgccgccatgctcgccgccccaagcacttcccgacgcgccgccgcagctggcgggcgggccggggcggggcgacgtgccctgcgtccccctcggcgggctgccgccgtgcccgcgccggctccccagcccgagcctgccccttgccctgatgaggtgcaaagagcgggatcggaggcggggcctggccgggctgtgagcggcgtatgcaaatcgagggtctcggggatgcggatccaagaccctgggaaggtacgcggggcctggcggggcaccagctgctgctagctcggctgcaatgcaagtggtctaggttgctaaaggcatcccacagcctctccatctgaacatgacccaaacgaaactcgtgaccctaattccatgtctgcgcatttctagactgttgtccccccccccccccgccccgactactcagtcctccgtcttccggtccagggccccttgccaagcaccgggtccacctctccgtccccaccccggttgccttagaagtccgtcctgtcgcaacactgcagtcatggtcttgaggcccacccgccccaacgaacaccatcatgctgaggactttcccgggcaggccctgacttgctcagaaccagcgggggtgtccccttcccacccagggccactcccctgcactgtcacccggagagactgctcctctgtgccatccctggctcccacccaaccccagacccccaccacctctccatccctccagctgtggaggtctcacaaccccccaacccatctcaccgcccccccacccccaccccaaggcaaagtgactgaagcgggcagatggcttccttgaaacattttattgacagaattaatgaaggcccaagactttggggcctgggttgtggggggagggtgtttaaggccgggggttcaggccgggggatttggggccgggtgggtggacgagtggacctgtcaggtcccaggggccgggtgtcagaagctagtcctcgccaggggccacttgagagatggtggtcgtgttgaaaagggtgctcagtagcctgtcgttgtgaaccaccatgtccagcagcaggggagtgatgttccgctctccgctgttctgggcctcgttgcccgccagctccgggaccttggccgtcaggtactcaataaccgcagcgaggtagaccggcgccgtgcgactcaggcgctgagcgtagtggccctcccgtagactgcgctccacctggctcactgaaaacgaaagctccgctcggacggtgcgagagcaggtccgcccccggccgccagcaccggaggaccctcggcgtctcctcctcctcggcatgctgggcgttgagtgtgctatctcggcttggcccagctaggcaagatggctctcaagaggacagttaccgcgtccagtactgtgtatcctagcgaccagggcccagcccctcattggctagggagccgagaccaatgggcacgcacatccggcgacgggcacgcatgtggtgacggcccctcacaagggacacacgtccgtcaggtgacctcatcactttcccattggcctcgagggagcaggcctgggcctagaagtggctggagggccgtgggggtggggtggggcggggcagggggaatcgcgctggtgaccctctctttgccagtgggaactttccctttctactggatgggaacaccgtgggaaagacaaaggggtgggcgaggggaggacgggtaccacgccttcacaatgttgcacatccatcacgaccacctagttccaaaacgttttcaacaccccgaaaagaaaccgaaacccctgtacctataagcagtcacttgccgcacgcctccttccacaccaccactaccagcccccacaccctcccacacacaccccctgcccccgcccatacacacgttcccgatagtccctggcaacccctagtccatctgctttctgtccatagaggttagcctgttctggagatttcctatagatggaattatacgaccaaatgtgaggccgtgtgtgtctggctgctttcacttagcgtaatggtttcatcagggtgcatccatgtagaggcatgaatcactacttccttcctttgaatgactgagtacgattctgttgtatgaataggaggccacattttgtttacccactcgtcagttgatggacaggttatttcccccttctggctattgtgagtggcactgccatgaccatctctctacaggtttttctttgaatatctcttttcagttcttttgggtctatttctagcagtcaaactgctggctcgtgtggtaattctgtttaacttattgaggaaccaccaaactgatttccacagcagctgtaatctttcgcattcccaacagtagtgcatgagagtcccaatttcttcacagcctcatcaaaacctgttttctgtttgcctcattttgttttgtttacagtagccatcctactgggtgtcaagtgctatctcatggtggttttcattcgtatttcccaaatggctaatgatgttgctgtggtttgagtgcatcccccaaattgtgtgtcttggaaacttaatccccaaattcacatgttgattggaggcgcagcctctgagacggtaattaggattagataaggtcatcggggtgagacccccaggatgcgactggtggctttataagaataggaagagaggcctgaaacgacatacacgctcttgccctctcgccgtgtgataccctctgccgtccccagatgccgggtcacttcccagtccccagaacggtaagaaataaatttcttttctttataaattgttcagtgtcgggtattcaattatggcaacagaaaacagactaagacatcttttcatgtgcttcttggccctctgtacctctgctttggaggaatgtctattcaagccctttgcccattttttaattcggttgattgtattttggctgtgggcttctaaaacttattcatatattctggaaaatagactcttatcagatatgtgacttgcaaatgtttctcccattcactttctggatagagccctttgttgcccaaaagatttacatttggatgtagtccaacttgccaaatgaaaagatatctgtggctttgcctttggtgtcatactgaaggagctgttgcctaatccaaggtcgtgcaaagttacatctccgttttcttcttagagttttatagtttcagcccttacatttagatctgtgatccattttgaattaattctttacatgatgtgaggtaggggtccaggggccttcttttgcatgtggctatccagttgtcccagcgcagtttgttgaggggattattcttcccctccacccattgaggggtgccggaactcttactgaaaataaactttacataaatatatgggtttattcctgactctgagttctgtaacattgacctaatgtatcgatcacgatggcagtaccacccttttcggattactgcggttttgtagtacgttttgaaattgggaagtgtgagtccttcaacttttttcttttctgagattgttttggctatctgagccccttacattttcttatgaattttaggatcagcttgtcagtttttacaaagaaggcaggttggattctgacaggcatcacgatgaatctgtatattgccttggagattatgggcatcttaacaatattaagtgtcccaatccgttaacacaaaatgcctttcgatttatttaggtcttctttaatttattttagcaacgtcttgaaattttcagagtatacatcttgtacacctttagttaaatttattcctcgacattttattgtttcgatgctactgtaaaatgaatcatttccttaatcttattttcatgttattcattgctagggtgtagaaatacaaccgactgttgcagattgatcttggatactgcaactttgctgagccgaatatgctttgctgagcatactcagacagggttggcatattagtccgttcctacactgctataaagaactgcctgagaatgggtaattcctaaagaaaagaggtttaattgcctcatggttctgcaggctgtacaaggcttctgcttctgggcaggcctcaggaaacgtgcaatcatggcggaaggcgaaggggaagcaagcaccttcttcacatgttggagcaggaggaagagagagagaacgcacgcaaagggggaagcgctgcacattttcaaacaatcatcagatcttgtgagcgctctatcagaagaatagcaagggggaagtccgcccccatgattcaatcacctcccactaggcccttccttcaacaggtggggattacaattcgacatgagatttgggtggggacacagagccaaaccgtctcagttttttttttttttcttttgttggactctttagtgtcctctatataagaacatgccatctatgcatctatgaatagagatggttttacttgttcctttccgatctggatgccttttatttctttttcttgactaattgccctgactagaactttgagtacgatgttgagttacaagtggcattcctgatcttagggggaaatcaaccagtctttcaccattaagtatgatattatctctgggtttttcatggatgccctctatcaggttgaagaagtttctttctgttcctggtttgttgaatttattttcatgaaagggtactgcgttttgtcaaatgatcctttttgtacatgattaagatgaccatgagccccctcccccgcccccgctccgccatgcattctgttaatatggtgtattatataaattgattttcacatgttgaaccaaccttacatttgtgggataaatcctatttggtcatagtgtataaagagtggtcaataaacatttcgttgaaagaataggagtggatctggcaagcttcttggaggacaatgtgtgtgttaaagaatctgtagcatgatgagaagccaaggcaccggtgggaggaggggagttgcaaccaattcattaaggctggagagtacgatgccagtggagcagtagtggttgatgtggctgggaaagaggtaggcaggagccaagacatggaggttctattatgccatgctcaggttttagaataccctgtaggctacactgaacccactgtggtctttcagcttgggagtgacgtggtctgatttgcctctagaaatatcaccctggaagctgtgtggagaatagaacagagaggattgtgtgtggagaatagaacagagaggactgagattggaattagaaagctgctgtattataccagtcaagaaatgacagatatctcaactaagacaatggcattggtagataagactaggggacagagtccataaaaagtttaggtagtaaaatggcacacagtagacactcactacatattactcatactggtgaacctagctggagacatgataattcatgtgctcattcttcaaaaaatattgaagggtagtgccaggtatactgtgttaagcattgagacaacaccaacgagaaatattctgttgtataaataggccacattttgtttatctactcatcagttgatgaacagttcattaaatgatttccatggcaggggaggtaaatgttgtcctctatcctcttagattctccagctaggacttaaataagatagattaacaaaagaaaagcatacaaaattttatttggcattttttacatgtacatgggagccctcataagaaatacgaagactcaagtgattaattacagctgaatacttacatactagggtgggaaaagtatggtaaattgtgaaaacataacaagacattggggtttgggctaggagagttaattgtggaaaagtcactaagaaggtaagagttgtgtaacaaggttttttggtgcagctttccctcaagcctggactccccatctctggcaataagaatgtgtttcttcttcctggtatacagataatacctttcacatcagagtttcatctcttcctttcatgaaaaaaaaaggaaggtcagtgtgcccttcttgcatctgctactttcaagtgcctttaaacacaaaataatcaatatgccaaagtggcatattttgaggtggcatttgatcccctacattactgattggatagtgtgaatagtgctgccatgaacgctcctgtacaagtgtttgtttgaacagatgttttaaattgcagacgctcctcaacttgggatggtattatatcctgataaacccattgttagttaaaaccattattagtgtaaattcatttaatacagctatattagtccattctcacactgctataaagaactacctgagacttggtaatttatgaagaaaagaggtttaatggactcacagttctgcaggcttaacaggaagcatgactgtgaggcctcaggaaacttacagtcccagcagcaggtaaaggggaagcaagcacgccttaccatggtggagcaggagagacagagagtgaaggacggaaatgtcatacacttttaaaccatcagatctcatgagaactcactcactgtctcaagaacagcaaggggaaatccacccccatgatccaatcacctcccaccaggcctctcctctgacacacggggattacaattcgatgtgagatttgggtggggatacagagccaaaccatatcagcggctaacctaccaatcatcataatttagccaggcctaccttaaacatgctcagaacacttacaattaggctacagttgggcaaaatcatataacgtaaagccaaatttataatgaagtgttgactatctcacgtaatttattcaatattgcactgaaagtgaaaggcagaatggttgtatgtgtactttaagtacttttatgcatatggattctactgaatgcatgttgctttcataccatcataaagtcaaaatattgtaagtccaaccattataagctgggaaccatccatatttgaggtacatacccatgaatatatttatgggtttatttcttgcttcttaattctattccatttatatatatgtctgtccttatgccagtaccacaaagcattgataactgtagctttatacgaagttttgaatttgggaaatgtgagttatccagctttgttattttttaggattattttggctatttgaggtcttgcacaattacacatgaattttaagattggcttttccatttctgccaaaaaaaaaatggccattgggattttgatgcagattgtattaaatctgtagatcactttgggtagtactatcatcttaataatattgtcttccaattcatgaacacaggatatattttcacttctttatgctgtctctaatatctttcagcaatgttttgtagttttcagtgtacaagtcttttacctccttagctgaatttattcctaagtattttattctttttgatgctattttaaatagaattattttttattttgttaatttcatctcagattgttcattgctagtgtgtagaaatacaactgatttttgcacgttgatcttatatcttgcaactttgctgaattcgtttattagctctatagtgttttgtggattcttcggggttttccatacataagctcatgttcatctgagaataagatagctttacttattccttttcaatttggatgccttttatttctttttttcctaattgctctggctaagacttccaatacaattttgaatagaagcagtaaaagcaggcattcttgtctcgtttctaatgttagggaaatatctttcagtcttctaccattgagtgtgatgttagttttgggtattttatgaatgctctttatcatgttgtggattttctcttccatttctagtttgcttagtggtttttttttttttttttttttttggtcatgaaaaggtgctcagctttatcaagtgatttttctgcatcaaccagaatgaacttgcaggggtttttttccctatattttattaatgtggagttgactgggggattgattgtcttatgttgaaccagtcttgcattattgggataatttccacttgagcatgggctataacctttataacatgctgctggatttggtttgctaatattttgttgaagatttttgcacctagatgcataagggaatattatactcacatattcaattacatgcaatttgtaattttcttttcttgtgatatatttgtctggctttgatatcaagatatggtggcctcatagtatgagttgtaaagtttactctccttttctgtctcttggaagagtttaagaaggattaatgttaatccttccttaaacatttagtagaatttaccagtgaggccttctagcacaatgcctggcacataatatatggaatctaggatttgtatagtcagtcattaactatttgttgaattaataaattgtctccccaagcaggtttctaatcaaggcacaaagattgagtaacgaatgaaggcaaagccaatgtatacagggtattagttttctaatgctggggtggcaaattaccacaaacttaatatggcttaaaacaacacaagtttattatcttacagttcgatagggcagaagactgacccaagtcttactgggctaaaatcaaggtgtcatcagggctgcatttctttctggaagctctagaaaaggatcctttttcggtcgcctgtagtcccagctactcgggaggctgaggcaggagaatggcgtgaacccgggaggcggagcttgcagtgagcggagatggcgccactgcactccagcctgggcgacagagtgagactccctctcaaaaaaaaagaaaaagaaaaggatcctttttcctttcttttccagcttctagaggccacacacattcattaactcatggcttccttcctccatcttcgaagccagtaacattgcacctttgtgactattcttaagtagtcacgtctccctttgactctcctcttctgcctctctctctcactttcaaggcctcttgtgattacattgggccgacctggataatccaggatattctccctattttgacatcagctaattggcaaacttaattccatctgcaaccttaaatccctcttgccatgcaacataacacagtcaaatgttctggggattaaaatgtggacatcactgagagatcatattcttcctagcacatacggtttagtcacaagttaatgatcaacatttattagctatataatactcttaagttcaacataaactttttggatgctgataaaacggaatggcattttacattgatatatacttcatttcaaaacttcttctacttctcaatgattattctgtagcaacaaatttcttttaaatcagaaatttggaaacataacgagacctatctcaaatcaaagatgactatccccttttggagtcagactacacattcattattttagtcaaaatgagacataaaattcaggcccccaagagctgccagtacccacttacgcaggaggtagctagacgaaacaggtagctttctacaaatgattttgcaccatcccaccccagagaggtggtttggagtgtttacttattacctgggatttaattatactagctcttgcaaaagccaaatctaaaggccataaatagaaggtcaaattttctcctatatagaaaggagagcagcagagaaaacaaaatccttggtaaatctttaaacaaagttatatggtttgaatatgttattcattctattttaaccccccaatacagatatatttataaaaaagaatattgtgatttctggtataacttgtttaggaacaaagccacaaatttattaatattttctattccctgggaagaaaaaaatgctacatggcagaataattttttaaaatttccagccgggcacggtggcttatgcctgtaatcccagcactttgggaggccgaggtgggcggatcacaaggtcaggagattgagaccatcctggctaacacggtgaaacaccgtctctactaaaaatacaaaacattagctgggtgtggtggtgggcgcctgtagtcccagctactcgggaggctgaggcaagagaatggcgtgaacccgggaggcggagcttgcagtgagccgagatcgcgccacggcactccagcctgggcgacagagcgagactccgtctcaaaaaaaaaaaaaaaaaaaaaattcccatgatactaaactgatgtgtgatcatataatagacttacactgatacctattttagtgtattcaagcagataaaaaatcccaggtgttctatgagtgatatcattttcagtatttcttatgctgtatgccatggtttaaatctaggcctttcgaattggcattactaccatatttctcaaactgtattccctttctcttgaatatgttatgtaattttgtccagaacccagacatgtcaaggtgtcaaatcccacgttttggatactaacgtgtctcattaattcatacagtgggatcattcattaatgcccacattatagactctctctctctctacacacacacacacacacacacacacacacacacacactacattcttagaagatcattctgagaccagggtggaggataggctgtgcattcccagtactctttcacagctgactgtgtcctctgccagtgttttcaaactttactgcttatgaaacagctaagggtcttattaaaatttagattctgattcagtagaactgacatggtgcccaaggaactgcatctcttttaaaaaatctttatttaggtataattgacaaaagttgcatatatttaagaggtacaacttgatgttttgatatattttgtttttcatatatgatgtttgatacattgtgaaatggtcaccacaagcaagctaattaagatatatctatctctttgcctagctacctttttttgtggtgagaacatttatgacctactcttttagcaaatttcaagtatacaatattgtttactatagttactatatcgtacattagatctccagaactaatttatcttgcataattgaaattttgtaccctttgatcaacatctccctgtttcccccacaccacagtccctagcacctaagattctactgtctgcttttatgagtttgaccatcttagattccacatatgaggtcatgaagtatttttctttcagtgtctggcttattacacttagcataatattttccaggttcatccatgttatcacaagtgggaggattttcttctattttaaggccaaataatattttataattgtgggaatattccatcagatatatatatatcagattgtctttatccctccatccatcaatggacacacttaggttgtttccatatcttgactattgtgaatactgttacagtgaacatgggagtgcagatattcaacatactgattttgtatcctttggatatataacagaagtgagattgccagatcacatggtattcatttttagtttttttgaggaacctctatgctgtttttcataatggctgtaccaatttatttttgcagcaacagtgtacaaaggtttccttttctccacattaccaccaacatttgtcatcttttgtctttttgataatagctatttgctatggtttgagtgttttccccaaaaaacatgtgttggaaacttaattcccaatgcgacagtgttgggaggtagggccgaatgggagatgtttaggttatgaggactccaccctcatgaatggattaatgccgattacaaaagcacctaaggctgtgaatttgaattgctctctcttgccctctttttgcccttctgccatgttatgatatagaaagaaggcctttgccagatgctggcctcttgatcttggactgcccagcctccagaactgtgagccaaatacatttctgttcactacaaattactcagtctgtggtattctgtcatagcagcataataaattagagtccataataagttatagtccataacagactaagacactattctaatagatgtgagggaatatctcattgtgttttgatttgcatttccctgtgggttagtgatgctgagcatcatttatctgttggccttttatatttcttcttttgaaaaattctatttgggttctttgcccatttttaattgggttgtttcttactaatgagttgtttgagtttcttacccattatcagatatacagtttgcaaatattttcatccattccataggttgtcttttcactctgttgattatttcttttgctgtgcagaaagtttttagtttaatgcaatcccagtttctatttttgtttttgttgcctgtgcttttggtgtcatataaaaaaattattgcccaaatcaatatcaggtagcttttttcctgttttcttctaggagttttatagtttcaggtcttatatacaagtgtttaatcaattttgagttgaattttatgtatagtgtgagaaaagggcccaatttctttcttctgcatgtggatattcagttttcccaatatcatttattgaagagactctcttttccccgttgtgtgttcttggcacccttgtcaaaaatctgttgactgtaaatgtgtgaacttatttctgggcttttctattctgttcccttggttgatgtgtctatttttatgccagtaccatactattttgattactggagacttgtagtatattttgaaatcaggaagtatgatgcctctagctttgttcttcttgcttaagattgctttgccaggctgcatgtggtggcccacgcctgtaatcccagcactttgggaggctgaggtgggtggatcacttgaggtcagaagtttaagagcagcctggccaacatggtgaaaccccgtctctactgaaaaaatacaaaaattagccaggtgtggtagcaggcccctgtgatcccagctaatctggaggctgaggtggagaatcacttaaacctgggaggcagaggttgtagtgagccaagatcgcaccactgcactccagcctgggcaacagagcaagactctgtctcaaaaaaaaaaaaaaaagattgctttgcctccttggggtcttttgtgatttcatattaattaaaattttttttttatttctgtgaagaacaccattgagattttgatagggatcacatcaaatctatagattactttgggtagtgtggacattttaacaatactaattcttccaatctaggaatatggaatatcttttatttatctgtgtcttctttaatttccttcataaatgttttctatattttcattgtacaagtctttcatttctttggttaagtctattcctaagtattttattcttttgttgctattgtaaataagattattttctaatttcctttgggatattttatagtgtatagaaacaccactgatttctgtatgttgattttgtatcctgcaactttacagaattcatgtattagttctaacaatttttttttgagtctttagagttttctacatgtatgatcatgtcatctgcaaaaagagataattttactattctcttctatttggatgctttttattttatttattttttaaattatattttaagttctgggttacatgagcagaacatgcagttttgttacataggtatacacgtgccctggtggtttgctgcacccatcaacccgtcacctacattaggtatttctcctaatgttatccctcccctagccccccaccccccaacaggccccagcgtgtgatgttccactccctgtttccatgtgttctcattgttcagctcccacttatgagtgagaacatgcagtgtttggttttctgatcttgtgatagtttttgagaatgatggtttccagcttcatccatgtccctgcaaaggacaggaactcatccttttttatggctgtatagtattccatggtgtatatgtgctacattttcttaatccagtctatcattgatggacatttgggttggttccaagtcttcgctattgtgaatagtgccacagtaaacatacatgtgcatgtgtctttattgtagaatgatttataatcctttgggtatatgcccagtagtgggatttgctgggtcaaatggtatttctagttctagatccttgaggaatcgccatactgtcttccacaatggttgaattaatttacactcccatcaacagtgtaaaagcgttcctatttttccacaacctctccagcatctgttgtttcctgactttttaatgatcaccgttctaactggcgtgagttggtatctcattgtggttttgatttgcatttctttaatgaccagtgatgatcagcattttttcaaatgtctgttggctgcataaatgtcttcttttgagaagtgtctgttcatatcctttgcccattttttgatggggttgtttgtttttttcttgtaaatttgtttaagttctttgtagattctggatattagccctttctcagatggatagattgcaaaaattttctcccatcctgtaggttgcctgctcaccctgatgatagtttcttttgctgtgcagaagctctttagtttaattagatctcctttgtcaattttggcttttgttgccattgcttttggtgttttagacatgaagtctttgcccatgcctatctcctgaatggtattgcccaggttttcttctaggatttttatggtcctaggtcttacgtttaagtatttgatccatcttgagttgatttttgtaaaaggtgtaaggaagggatccagtttcagttttctgcatatggctagccagttttcccaacaccatttattaaatagggaatcttttccccattgcttgtttgtgtcaggtttgtcaaagatcatatggttgtaactgtgtggtgttatttctgaggcctccattctgttccattggtctgcatatctgtttggccccagtaccatgctgttttggttactgtagccttgtagtatagtttcaagtcaggtagcatgatgcctccagctttgtccttcttgtccaggattgtcttggctatgagggctctttgttggttccatatgaagtttaaagtagtgttttccaattctgtgaagaaagtcagtggtagcttgatggagatggcattgaatctataaattactttgggcagtatggccattttcatgataatgattcttcctatccatgagcatggaatgtttttccatttgtttgtgtcctctcttatttccttgatcagtggtttatagttttccttgaagaggtccttcacatctcttataagttgtattcgtaggtattttattttcttagtagcaattgtgaatgggagttcactcatgatttggctctctgtttgtctgttattggtgtataggaatgcttgtgatttttgtacattgattttgtaccctgagactttactgaagttgcttatcagcttaaggaggttttgggctgagatgatggggttttctaaatatacaatcatgtcatctgcaaagagagacaatttgacttcctcttttcctatttgaataccctttattgctttctcttgcctgattgccctggccagaacttccaatactatgttgaataggagtggtgagagagggcatccctgtcttgtgccagttttcaaagggaatgcttccagtttttgcccattcagtatgatattggctgtgcgtttgtcataaatagctcttattattttgagatatgttccaccgatacatagtttattgagagtttttagcatgaaggggtgttgaattttatcgaaggccttttctgcatctattgagataatcatgtggtttttgtcattggttctgtttatgtgatggattatgtttattgatttgcatatgttgaaccagccttgcatcccagggatgaagccaacttgattgtggtagataagctttttgatgtgctgctggatttggtttgccagtgttttattgaggatttttgtatcgatgttcatcagggatattggcctgaaattttctttttttgttgtgtctctgtcaggttttggtatcaggatgatgctggcttcataaaatgagttagggaggattccctctttttctattgtttggaatagtttcagaaggaatggtaccagctcctctttgtgcctctggtagaatttgtctgtgaatccgtctggtcctgtactttttttggttggtaggctattaattactgcctcaatttcagaacttgttataggtctattcagggattcaacttcttcctggcttagacttgggagggtgtatgtgtccaggaatttatctatttcttctagattttctagtttatctgcatagacgtgtttatagtattctctgatggtagtttgtatttctgtgggatcagtggtgatatccccaatatcattttttattgcatctatttgattcttctctcttttcctctttattagtgtggctagaagtctatctattttgttgattttttcaaaaaaaccagctcctggattcaatgattttttgaaggtttttttgtgtctctatctccttcagttctgctctgatcttagttatttcctgtcttctgctagcttttgaatttgtttgctgttgcttctctaattctttaattttgatgttagggtgtcaattttcaatttttcttgctttctcttgtgggcatttagtgctgtaaatttccctctaaacactgctttaagtgtgtcccagaaattctggtacgctgtgtcttcattctcattggtttcaaagaacatctttatatctgccttcatttcattatttacccagtagtcattcaggagcaggttgttcagtttccatgtatttttgtggttttgagtgtgtttcttaatcctgagttctaatttgattgcactgtggtctgagagactgtttgttatgatttccattcttttgtatttgctgaggagtgttttacttcgaattatgtaatcagttttagaataagtgtaatgtggtgctgagaagaatgtataatctgttgatttggggtggagagttctgtagatctctattaggtctgcttggtccagagctgagttcaagtcctgaatatccttgttaattttctgtctcattaatctaatattgacagtggggtgttaaagtatcccactattattgtgtgggagtctacgtctctttgtatgtctctaagaacttgctttatgaatctgggtgctcctgtattgggtgcatatgtatttaggatagttagctcttcttgctgcatttttccctttaccattatgtgatgctcttctttgtctcttttggtctttgttggtttaaagtctgttttatcagagattaggattgcaactcttgcttttttttttgctttccatttgcttggtaaatattcctccatccctttattttgagcctatgtgtgtctttgcaagtgagatgagtctcctgaatacagcatactgatgggtcttgactctttatccaatttgccagtctgtgtcttttaattggggtatttagcccatttacatttaaggttaatattgttatgtgtgaatttgatcctgtcattatgatgctagctggttgttttgcccattagttaatgcagtttcttcatagtgtcaatgttctttacaatttggtatgtttttgcagtggctagtaccagttgttcctttccatgtttagtgcttctttcaggagctcttgtaaggcaggtctgatggtgacaaaatccctcagcattcggttgtctgtaaagaatttcatttctccttcacttatgaagctttaagaggtttaattgactcacagttctgcatggctgtcccataagtcccatgttctttcctcaggaaacctacagtcatagcagaaagggaaataggcacatcttacatggcagcaggcaagagagagtgtgtgaaggaggaactgtcaaacacttataaaaccatcagctctcataagaactcactatcaggagaacagcgtgggggaaaccatccccatgatccaatcacctcccactaggtccctcccttgacatgtgggcattatggggattacgattcaaggtgagatttgagtgggaacatagagccaaaccatatcagtatctaaaaggaaaaaccttcagtttttccacatttggttatgatatcagctgtgagcttttcctatatggtctttattgtgttaagttccttctgtatctatcttgctgaaagtttttattatgaatggatatctagttttgtcaaattctttttctgtattgatcgaaataatcatgtgtttttcatctttcattctgataatgtggtatatcacattgattgatttgcccatgttgaaccatccttgcatcctagggataaataccacttgttcatgatgaatgatccttttaatgtgctgttgaatttggttggctggtgttttgttgaggatttttgtatccgtgttcatcagggatattggcctgtagttttctttcttttcttttcattttctttttctttctttttttttttttttttttttgagacagagtcttgctctgtcacccaggctggagtgcagtggtggtatgatcttggctcactacaacctccacctcctggattcaagcgattctcctgcctcagcctcctgagtagctgggactactggaacatgccatcacacccagctaatttttgtatttttttagtagagatgagttttcaccttgttggccaggctggtctcgaattcctgacctcaagtgatttgcctgcttcagcctcccaaagtgttgggattacaggcttgagccaccacacctggcctggcctgtagttttcttttctagtgttgtttttgcctggatatggtatcagggtgatgttggctaataaattgtattttgaagtgttctctcttgtattttttggaagagtttaagaaatactggtattaatacttcgttgaatgtttgatggaattcatccatgaagccattggtcctgggcttttctttgttggaaggtttttgattactagatttaatatccctatttgttgttagtctgttaaggctttctatttctttgttattcagttttggtatgttatatgtttctaggaatttatccatttcctctaggttaaccaatttgttgacacttataatagtcccttatggttctgtctgtttctgtgacatcagttgtagtgtctcctctttcatttatattttatttatatgagtcttctctctttttttcgtagtctagataaggacttgtcaattttgtttattttttcaaaaaaatcaactcttagttttgtcagttatttccaattgtttttttattctcttttttatttatttctgctctagcatttattatctcctttgttctgctacctttgggcttagttttttttttcttctttttgtagttcctggaggtgataagttgggttgtttatttcatatgtttcttctttttaaatataggcatttattgctataaatttccctattagtatgcttttactgcatcctttaagttttggtatattatcaagattttggtttcttctgtgacccaatggtcgttcaagaatgtgttgtttagtttccacatatttgtgaattttcgtgttttcttattgttattgatttgtagtttcaatccattgtggtcagaaaatatacttggtatgatattaatcttcttaaatttattatgacttgttttgtgacctgaaaggtgatctgtcctgaagaatgttttgtgtgtgcttgataattctactgttgggtggaaagttctgtatatacattttaggtccattgggtctattttattcttcagttctgttttgtccttattgattttctgttgggatgatctattcattatagagagtggagtattgaagtcaactatattatattgttatctatttctccttccatgtctgtcaatgtttgctttatatatttaggtactttcgtgttgggtacatatatatttataattattacatcttcctgttcaagtgacccttttattatataatgaccttctatgtctcatgtcacagttttttacttaaagactattttttctcatacaagtatagccacccctgctctcttttggttacagtttgcatggcataactttctccaccccttcactttcagcctatgtatgtccttaaatcaaaagtgagtctgttatcaacaacatgtagttgggtcctgtttatttttgtttcttacttcccatctctgaattgttggctttttaaaaagcccattcagttactctgtgtcttttgactggggagtttagtcaatttacacttaaagtaattattgataggttaggactttctgttgccattctgttaatagttttctgttttgtagttttcttgttcctttcctctttttctttctttgtggtttgatgatttttgcttggatgtgttttgattcttttctctttatcttctgtatatctactgtgtgggggggcggtcgggggggttaccacagggatcaaattgaacactttatagttatggcagtctgttttaagctgacaacaccttcaatcacatacagaaactctatactttactcattccccccgccacaactttatgtaatcgacgtcatattttacttccttctatattgtgtttccattgacaaatttctgtcactatagttactattactatttttgtcttttaatttataaattaatattaatagtgatttataacaatcattatagtgttacaatagtctatgtttctctttatatttacctttagcagtgaaaggattcatatgcttttgtgttactgttttttttttatttcaacttgaagaactattagcacttcttataaggcaggtctcatggtgacaaaccccctcagtttttgtttgagaaaggctttatctttgtgttcattcttaaaggacagtttttccagataaagtattgttgattggatttttttctctcagtactttgaatatatcatcccactctttcctgacctgcaaggtttctgctgagatatccactcatagtcttatggagctcccctataggtgacaattcactttcttcttactaccccaaaattctcttttgtctttgttgaaaatttaattataatgcatctcactgtagacttctgtgggtttaatgtatttggttatctttgggcttaatgaatccagatggcacttcccctccatagatttggggagttctcacctattatttctttaaataagtttcctttctctctctcttctccttttaagatttctataatgcatctatcattttgcttgatgatgtcccataagtcctctgttcttccttcactctttctcattgttctttttattccgctaactagataatttcaaatgacttgtcttcaagtttacaaattctttcttctgaatgattgagtctgctattaaagatcgctattaaattttttagttcagtcattcttcagctatattcagcaatattctttagctacaggatttttatttggttcttttttatggtttttatttctttattaaacttctaatgttgttcatgtattgttttcctcattttgttagtcgtcttcctgtatcctcttgtagctaattgagcttctttaaatgattattttgaattctttgtcaaaaatttcatgaatctccatttcttcagggttggttactggagctttattagttccctttggtgatgtcatatttgcctgattcttcatgatccacatagcctagcattggtatctgtgcattggagtgagctgacacctcttctggtctgaagttgggtactcagacaatgggcccattaccagggctttggataggtgtagctctcactgggtccttgagtgggcaggactgcctgcagaccatgatgcagtgggcctggagctgggtcaaagggctgcttcagggtccccacttgggcccacagtcagtgggcctgttatgggggcacaggtaagtgtggattcaggcaggactgtctccagaacatggtacagcaagactggagttggctcacagggttacttctgagtccacagtcaggtctagttggtgggcctgcttccagaggtggactggcatgactcccacctgtttcctaagtaggcaaaacttccccaagaccatggtagtgtggtactgaagctgctttaggtacagggctgcttcagagtccacagttgggagccctgttactggggttgccaatgggagttgctcctcccagattcctgggcagatagggatagtggtaggaccacatacaaacaactctggagctaagtccccagggtggtgggctgcttctgggtccacaaccagaactacagttgacaggcctgccgctagaatgtgggcctgccttattaaagtattcatctttgttcttgagctctaccagggtttctcaacctcctacctgaatcccaaggctcccacaaagacacttttgtccatagatcattgtcaaattattgttcctgtgggggaacaagagctagggacctcctatcccatcaactcactgataccgttctcctgatgctgcattttgaattgccctcaggtgatgctgctactcctggtctgtggaccatgctggagtagcagagcccaaatggcttcctcaacttttatgagccttttacaggaactcaaagtagaaaataacttcacttgccccagacctaataatttcctttgttcccacttcttcttggtgctttcctcctttgtgtctaccatcgtaacatccatctaaccatagttgtcttatgtagatgttggatgctgttgagaaacgcacaaagcaaattagaaggaagatatgattgacagaaattgctttttactctgtattcactttccatgtatttgtgctaatctctccatacaggtcttctttggcaatgtggattcatctgggataaaacacaatatttttaaccctccaattattgctcgatacatccgtttgcacccaactcattatagcattcgcagcactcttcgcatggagttgatgggctgtgatttaaatagtaagtgccaagtcatcccatatccttcttccctcaaccatgggtagggtgactaactgttctagttatcctgagactgggggaggggttcccggtatcaggacacaaaattgtcagtgctaaaaccagcatagtcctgggcaaacccagaaataccattcaacccagcagtcccatcactgggtatataatcaaaggaatataaatcattctgtcataaagacacatgcacgcatatgttcatttcagcactattcacaatagcaaaggcatggagtcaacctaaatgcccatcaacaacagattggataaagaaaatgtggtacatacataccatggaatactatgcagccataaaaaagaatgagatcatgtccttttcagcaacatagatgcagctagaggccattatcataaatgaactaatgcaggaacagaaaaccaaatatcatgtgttctcataagtgggagctaaacattaaatgcacatggacacaatgatggacactcaggaggggagaggttgggaggggggtgtgggttagaaggttatgtattgtgtactgcactcactacctgagtgaggggatcattcatacaccaagcctcagtgacatgcaatttacccatgcaacaaacctacccatgtacccctagaatctaaaataaaagtagaagaagaaaagaaacaaagaaaattaaagagtcacacaaagtgggaagagctggctggaaaacagatagcaataacagaattggccgggcgtggtggctcacacctgtaatcccagcactttgtgaggccaaggcgggtggatcacgaggtcaggagatcaagaccatcctggctaacatagtgaaaccccaactctactaaaaatacaaaaaattagccgggtgtggtggtgtgcgcctgtagtcccagctactcgggaggctgaggcaagagaatcgcttgaactcgggaggcagaggttgcagtgagctgagatcatgccactacactccagcctgggtgacaaagcgagactccatctcaaaaaaacaaaaacaaaacaaaacaaaacaaaaaaccaataacagaatctgtgcaaaagttaaaacctgagaaatgatattatgatgacagtagccctagaatatcagtggaagctgctcagtataactgaggctgaagcatgtccttgtgataaccttcttttttcttttctttgaggttgcagcatgccattgggaatggagagtaaagcaatatcagatgcacagattactgcttcatcctactttaccaatatgtttgccacctggtctccttcaaaagctcgacttcacctccaagggaggagtaatgcctggagacctcaggtaagaggcaacagatttactgtttaactgactcagagcagtggttggggaaaaaatcggggaaggccttgactgtttcttctgaggtatttctgtcaactgttagttctaaaaagtgtgtcaaggaagtttggttatgggcagacaaccacacaggcatttgggggaaatgatctctaattgaacctcctggaagaagaatctctatatctagtactgagctaatatctgtcaaagaattgtagaagctaaagtccattttacagataaatatcaacaattagctttctttccaggtttctcattacatcaatgaaaagtaaacatttactgcacatcttagtatccctaggatgagcctagggatacaaaggtgaattgtgaaaaattttggccctgaagttgcttagagttgaataagagagactgactagccaatagaaagtggaggctgggtgcggtggctcatgcctgtaatcccagcactttgggaggctgaggcgggccgatcacaaggtcaggagttctagatcactcttttgctgaggcaggataatcgcatgaacctgggaggcggaggttgcagtgagctgagatcatgctattgcactccagcccaggcaacagtgcctgactctgtctgaaagaggcagagagagagagagagagaaagaaaggaaagaaggaaggaagaaaaagaaagaaaggaaggaaggaaggaggccgggcagagtggctcacgcctgtaatcctagcactttgggaggcctaggtggcagatcacctgaagtcaggagttcaagaccagcctggccaacctggtgaaacctcatctctactaaaaatataaaattatctggacatggtggtgggcacctgtaaccacagctactcgggaagctgaggcaggagaatcggttgaactcgggaggcagaggttcagtgagctgagatcatgccattgcactacagcctgggtgacagagcaagactccgtctcaaaaaagaaagtagagtgagaagtgctgtggtatggttaagagggatttgggaatttctgggagtaaatggtgaccaagaggctactagtccaactctattgccctcaggtgaataatccaaaagagtggctgcaagtggacttccagaagacaatgaaagtcacaggagtaactactcagggagtaaaatctctgcttaccagcatgtatgtgaaggagttcctcatctccagcagtcaagatggccatcagtggactctcttttttcagaatggcaaagtaaaggtaagctggtctccttggaaagaaagaaagaaagaaaaaaaataccacctctcctagagcttaacataacataaaaaggttgatatatgaccaaattttcagagcaaaatttattaagtacctatggtagcaagacattgtaaaaggcattctgagagaacacagtgactttaagaaaaaggtaaaatactgagaaaagggcagagtagatccaagagttaattctcctcatcagcaccttgattcccaagcctttttgacctttaagtttagtggtccaggaagtcttcattcttaatctgggtttgctggataattcaacaaattgtcctgattaaaagacatgacataaagtcttatcaccccatgagtaatgggggaaggaatagttcctctctttggtattttttatattcttttttcaccaagaattaaccatgatgtggtccttaccaatctctctaatacagtctcttgccacttggctctttaagctccatccatactaagaaattctcaggtcactaaatacagccattatatctcataccaggcttttaaatagatactatttcttctacctggaacatttttctagctaccctctactgccactttcacctgactcattcgttaagtctcaggtaaacatcatgtccaagaagaattcccttatccatcaaggctggatgaaagacttcaccaaactggcagtttggtgaactgaagtctagacattggatattctagaagaaaaattcccatttaaaaaaggttatatctctgattagtgccacaacatgatgaactttcaaaatatgctaagtgaaggccgggcgcggtggctgatgcctgtaatcccagcactttgggaggctgaggcaggcagatcacgaggtcggtaaattgagaccatcctggctaacacagtgaaaccccatctctactaaaaatacaaaaaattagccaagcgtggtggcgggtgcctgtagtcccagctactcgggaggctgagacaggagaatggcatgaacccgggaggcagagcttgcagtgagccgagatcgcaccactgcattccaacctgggcaacagagtgagactccatctcaaaaaaaaaaaaaaaagaaaatacgctaagtgaataggccagacataaaaggatagatattatatgattctacttatatgagtgtgttagtcagggatatccaaagaaatagaaccaataggagattctgtctgtctgtctctctctctctgtctctctggatgagctaaactgttttagttcaagactgaaagcaggaaaaagctgatgttccagtccaaaggcagacaggcagcaagaatactttcttacttggggaagactcagtctttttgttctattcaggccttcaactaattggatgatgcctcccacattagggagagcaatctgctttactcagtctactgacttcgatgttaatcccattcaaaaacaccttcacagaaataaccagaataatgtttgagtaaatatctgggcaccttatgaccaagtaaagtagatacataaaattaaccatgacaagtccaccccttgtcaatgtagcacccatcatacacatctcctttatctctaagtagagacaaaaatgaggtcataattccacctaacatgatataacaaaacttggctggtattgataactaccttcttctactacccattctgtattgactttgccttcagcaagcatctcagctgattgtggttctttacctgatgaggtgacccaaacctttattcctgaagagcctgggccactagtagtcctgcatggattgggttgctgtagtttcccattgaccagaatcatagggcctggtaatactaagagacactctaagggatctattgtattccagacacactcttccatacctccattgtgaagcagtagttcagtttccttccaggaaggacaaaacgctgccccttccatgatgaacatattccaatgtaatcaacctgctgccagatagctggctgatcatcctgggaaatactgccatactgaggactctgtgtttgtctctactgctggcagattgggcacttagcagtggccatagccaggtcagccttgttgaatagaagtccatgttgctgagcccatgcatagcctctatccctgccaccatggctactttgttcatgagcccatcaggcagtgacataggtggctgagtaaaaaggatgactggtatccacagaacaggtcatcatatctactttttttttgagatggagtcttgctctgttgcccaggctggagtgcagtggcacaatctcagctcactgcaacctctgcctcccaggttcaagcatttctcgtgcctcagcctcccgagtagctgggactacaggcacgcatcaccatgcctggctaatttttgtatttttagtagagacagggtttcaccatgttggccaggctggtcttgaactcctgacttcaggtgatcctcccgccttggcttcccaaagtgctgggattacaggcgtgagccactgcacccggcccatcatatttacttgattattgaaatccttatctgctgaggtcacccttcgttgagcactcacatgggacataaatatattcacatcctttgcccattcagagagatctgtccacatacctcttccccaaatttctttgtcacctgttttctaatcatgttccttccaagtccctatctggacaaagcactgactacagcccattacttgacatataattgcacacctggccatttctccttctaagcaaagtccacaaccaggtacactgcctaaaattctgcccactgtccttcatgggtatctcagatcgggactgtccacttttgtgtagtacctgcatatcgtgcagaaccgtctgtaaaccaggcccaagactcctcttcctctgtaaactgatcatagggaactcccaatggggccataagtgcaggctgggagagagaaggcagggtagcagaaacaggcaccatggacatttgggctacttcttcatgtaatttacatgtgttttcagtacctgctcagacatgatcatgtatataccacttccatttgatgatggagtgccattgttcatacccaactttatggcttggtgggtcagataacacctagttcatgatgggcagttcaggtcacatggcaacttggtggtctgtggctaagcattcagtatctactaaggcccagtagtaggccaagagctatctcacaaaaggagaacagttattcacagaggattacaggaggatttctcactacagtagcccctgctccataggtcagggaaccaatgtgaagatcctgctagctgctcaatatatctgttccaattacgcattccaggactggggaaataaccacaagatagtctcacagatcctctgcatccactttgagatggacttgagctaaaattccattgatcatttgaccctccataagcccatactctgactggtggaccacagtgacattttgggtctcctgaaattagtgccagttcagagccattgtccagtagtccctgaaaggtctgattaattatttttcttcagtgcacatttattctgatagaaaggccatatgtccctttggggaaggctgagagaaagagtggcagtattcttggcagtgtaccagagtccttcctcaaggagactgagcctccccttcattcaaggagtgctgggtctgtaaacctgctcaagtctgggaattgattgagaggccgtgactctgtttttattattcaggttagacttttgttcacttgacctagaacttttccacttatgcagttcaagaatttggtaggcattctatctatatcacatctaggaacactataatctactagccaacaccataggtctgtgcaagtcatactattctaactgctgctttgactctgctgtcccttatggtaaccacacttaccttgcctttggcagttgagtgctgcccattggccccttccaccccaggatccaattattcccattgtatttaggttttctaattcagtgactgcaggtcctgctgtaaggtgtcacctacagagaagagtgatcacagagcccttcaaggatgctgaggttcccctcacaaatttattcctcaaagtaatagtgagatctgtgtcttctgaactctcccagtgttggtgagtatgtcttaaatgacaaattcactctagcatttcaatctcctttcttctacattaaaccagggcaagtctgaaatttctagtttgctcactgtgggccatcttttggtctgtgtttcagccaaccaattaaactgttagaggccttcctaattccctgagatgcaacattaagtccagaatctctgcttagtgggcccatgtcaataaatttggcctaatccaactttacgtgccttccaccgttatctcacatccttagtacccattcctatacatattctctggattcctgcttgtgtaaattagaaaactcaagtcatgattttggagtgtagtgcaccttgtcatgggtcaccttcatacctcacctcgcctgctgggacttgagtgtagttatagatctaataacaaagaggggtggtagggtgggtcctgaaggaatcagcattatcttgcatggcagttgcctcaggggaagccattacagtttcctcaggcagtgcagggttaatccacttagactggagtagagatactgccaccacagggctggagagaaaactttcactgacaaagaagactcatcaatatttaggagctcaatgtccccagcttaatcagggtcttccacacatacctaatccaacttgtagtgccccattctttcccaatcactgcccttgctttaacagtagacaccctgcaaagctgggagtttggcttgctttgtaattcagttagtcacaggatgagatttggcatttgattttcagcaatctcagctctgtggctacagtagataagggtctccttcagggcatacatagaatctgtcaagtcatttatgcagctcttgagctgggaattcaaattcctgagctcctccttttctttcatcactttttccagcaacattaggagcaaccgactaatcccatcatattcattagtttgacaaatatgttcacaagtgtcaatatacatagtcaccaagacccttgcttcttaaaagtagttgattaggagtatccaatggagatattttgcatatacatattttttgagatggagtctcgctctgtcacccaggccggagtgcagtggcatgatctcagctcactgcaacctccatctcccaggttcaagcgattatcatgcctcagcctcccgagtagttgggattacaggcacctgcctaatttttgtgtttttagtagagacagggtttcatcatgttggccaggctggtctcgaactcctgacctcaggtgatccatccacctcggcctcccaaagtgctgggattacaggcgtgagccaccgcgcccagcctggcctacatatttctattgccagatcatgccatggacaatttttactactgaaaatagtcattagtgtctttaaatttcatcaggttacagaaccaattccagaaatccaataacaaatttataaaatttatccttaaaattctgttcctttagaatcactcttggtgtgaaaatctgtattagtcatggttcccaaagaaacaaaaccagaaccaagaggagatacatacacacacacacacacacacacacacacaaggaattagctcatgtgattatggagtctgccaagtctcaagatctgcagggtgagttggcagcctagagaccccagagagctgattcgtagttccagttcaaagaccagcaggctacagacccagaaagagttaaaatgttttagttcgagcccaaaggcaggaaaaaaactgaagtcccagtttaaaggtagtcaaatagaaggaactgtctcttactaagaggacagtaagcctttttgttatatttaggccttcaactgattggataagttctacccacactggggagaacaatctgctttacttagtctaccaattcaaatgttaatctcaccaaaaaacactctcacagacacacataaaataaagtttaatcaaatatatgggcaccccatggcccagtcaagttgacacataaaattaaccaccataatgaggtatctagagcaggcaaattcataaagacagaaagtagaaaagaggttaccagggtcttggaatggggaagaaatggagagttatttttaatgagtacagagtttctgtttggggtgatgaaaaagttctggaaatggatagtggtaatgggtgcacaatattgtgagtatacttaataccactaaattgtacacttaaaaatgattaaaatggtaaattttatgtatattgtacaacaataaaaaaggctatatcactgacaatgcattgttgtatttagcaaagaaaggggaatctccagcctccccatcaacaaaaacccccacaaacttctattttaaaataatgagctgaaatcatagcggagaggtgaataatgagcaaatataaaaaggaagacctttcctcagacagaatgcccatattaatgttgttactggaagactaagccttgagcaaaatgcaaggagaactcagtgtgagaattctgcattgtcatgaatcccagaaggaagctagagaagttgcagataaatattatcctctggcacctggaagaaccattctcaacctactctagaaaaaaagcacctccagtttaggcctccaggattcctacatattaaaattataagatcacagacatagatcagcaaacatgcaagacaacaagacaacttgagtacaagtgaacagaaacaatcaattcagatttaaaacttgaagaacaccagatattgacattatcggatacataatatgaaataattatgtataaaatctttaaagtaataacatatggaaacatgaaaataaaagacaaattatccaacattattaggcagttgaaaaaaaccattgcaggttacaaagtcaacatgcaaaaatcaattgtatttttatatactaacaattacaaatatgaaaaggaaaacagaaaagtctatttacaatagcatcaaagataatacaatatttaggaataaatttaacgaaggaggtgcaagtcttgtccactaaaaacaaaaaaacccagttgaaagaaactaaagaactgtctggtctgaagacagcaaatatggaaaattagcaactagaaaaaaattaaaaattaaaaattaaaagagaaattaaataactaaataaatgaaaaggcatcctggatttatggatttgaagacataatattcttaagataagaatattaccacaaaccatttgcagattcaaagcaagcattctgggtttttttgtttgtttgtttgttttttgatttgagacggagtctcactctgtcgctcaggctgcagtgtggtggtgcaatctccactcaccataacctctgcttcctgggctcaagcgattctccggcctcaaagcattctctatcagaatcccaaagacatttttttttttgaggaatagaaaaatctatcctaaaattcagatggaatttcaagggaccctgaatagccaaaacaatcttgaaaaagaacaacgttggaggagtcatacttcccaatttcagaacttactacaaagctacaagaatcaaaacagggcagtacttacataaatatagacacatagatcaatggaatagaattgagagtccagaaataagcctatacatctatggtcaattgattttcaataaaagtgccaagaccattttgtgggaaaagaatagtctcttcaacaaatggtgctgggacaattggatatccacatgcaaaagaatgaagttggatctttaccatatacaaaatttaactcaaggctggatgtggtggctcacatctgtaatcccagcactttgggaggctaaggctggtggatcacttgagctcaggagtttgagaccagcctgggcaacacagtgagactctgtatctacaaaacaagaaaaaaaaattagctggcatgatggtacacacctgtagtcccagctactagggaagctgggataggaggatcgcttgagcccaggaggtggaggctgcagtgagccatgatcgcaccactgcactccagcctgggtgtcagagcaagaccctgtctgtaaaaaatcatttaactaaaaatgtatcaaaaaactaaatataaaagctaaaaccataaaactgtaagaaaaaacaaagaggtaaattgttatgatactggatttggcaatggtttcttagatgtgacaccacaatcacaagcaacaactctataaaaatatatatagtaggcatctttaaagttaaaagcttttgtacatcaaagaacactatcaagaaagtaaaaagatgatctacagtataggagaaaaaaattgcaaatcatatatctgataaagggcctagtatcccagaatataaaaagaactcttacaactcaacaacagaaagacaaccaaattttaaaatgggtaaaggacttcaatggaacttctccaaagaagatatacaaggatccaacaaactcatgaaaagatagacaacatcattagttattagggaaatgcaaatcaaaaccacaatgagatagcatttcaaacctgctaggatggctaaattaaaaaaaaaacaaaaacaaaatgtcaagcgggaaaataacaagtgttagcaagaatataaagaaattggaaccttccttgatgatgagaatgtgaaatagggcagccactgtagaaaatattttggcagttcctcagtaaggaaaacatagaattaacatagacccagcaattctactcctgggtgtggacccaaaagaattaaaagcaggcactctaacaaaaactaatatacaaatgcatatagaagtactattcataatagcaaacaggtgaaaacaattcaaatgttcatcaagtgatgaacagataaacaaaatgtggtctatccatatatggactattatttattcataaaaaatcaaagtactgatccatgctaaaacatggatgctccttgaaagcattatgctaagtgaaagcagccaggcacaaaaggccacattccacttatatgaaatacccagaatagcaaatccatagagacagaaaacagattagtggttgccagaagctggcagaaggagtgaatgtggagtggcttcttaataagtattgaatctccttttggggttatagaaatgttctggaactagatagtggtgatggctatataacattgtgaatgtactaaatggcactgaacttcacactttaaaattgttaaaatggtaaattttatgtttgcgaattttgcaatagataagtcagaagacatgtacattaccataatgagtaacaaactgacagctgatttctaaataatagcaaatatcagaaaataatgaatgatgtcttcacaatgctaaaataaacaatgtgaacccctctctcaaaaagaaaacctaatgaaaatatcttttatgcgttaaagcaaaagaggaaattaggacacagacaggcacagagggacgaccacatgaagatatagaaagaggacagacacctacaagccaacgagagaggccttacaagaaaccaacccttagccaggtgtggtagtgtgcacttgtagttcttgttacaagggtgcagtgagctagggttgtgccactgcactccagcctgggaaacagaacaagaccctgcctctaaaaaaaaaaataaagagaaggagaagaagaagaaaaggaaaagaaaaaaaaaaagaaccaagcctgctggccaggcgtggtaactcatgcctgtaatcccagcactttggaaggctgaggcaggaagatcatctgaggtcaggagttcaagaccagcctgcccaacatggtgaaacccccctctactaaaaatacaaaaattagctggacatgctggcatgcgcttgtaatcccagctactcgggaggctgaggcacaagaattgcttgagcccaggaggcagaagttgcagtgagcccagatcgcgccatcacattccagcctggactacagagggagactccatctcaaaaaacaaacagacaaaaaaaaaatacacacacacacacacacacacacacacacacacacaaaacaagcctgcctaccccttgatcttggacttgtagcctccagaactgtgagaaaataaatttctattgtttaagccaggtgtgcgtgtgaaaatttagaacatatgacaacagcaaaaaagtcagcatgtggataaatagaataaaggattctaaaatccatgtattatctaggaggtaaagatgttaatattaaaccttcataatttgattaatgttgtagtttataggatagccagtaagtaatagaaatacacacaatgtaagactcccaaaatggtagaagaaaaaatatgaaaggataaaatatactcaacaaacctaaatgaaagcaagcaaagagagataaagaaacataaaacaggtaggaaaaatagcaagataagatggtatatttaaattgaaatataacagtaatcatatgtaatatgaatggaccaaatatttcagttaaaagacaaagattgtcagattgataaaaaagcaaaagtagctgggtgtgatggctcacacctgtagtcccagctacttaggatgctgatgtgggaggatcacttgagcccaggaggttcagcctggacaagatagtgagacttgtctctttaaaaaaaaaaaaaaaaagcaaaagtaaattgtgtgcattttatgagtcatatctaaaacattagatacagaaaagtagcaagacaaaaatgggaaaagaaattatgcaaatatctaaaagatatcgattacagctctattgatagcagaaaaatagactttaaagcaagaaagtattgctgaagattaagaatgtgatttcatggctggacgcggtggctcacacctgtaatcccagcactttgggaggccgaggcaggtggatcatgaggtcaggaaattgagaccatcctggctaacatggtgaaaccccgtctctactaaaaaaaaatacaaaaattagccgggtgtggtggcggacacctgtagtcccagttactcaggagggtgaggcaggagaatggcgtgaactcgggaggctagattttaacacatctctcgtcaattgatggaacaatgtatagaaatagaacaattaacatgattcacaagtttgatcttatagacatatttagaaaatagcaccttgaaattgcaaaattacaagggtggttccaacatggccgaataggaacagctccagtctacagctcccagcatgaatgacacagaagacaggtgatttctgcatttccaactaaggtaccaggttaatctcactgtggcttgtcggacagtgggtgcaggacagtgggtgcagcccaccgagcatgagccgaagcagggtaaggtatcacctcacccgggaagcacaaggggtcagggaattccctttcctagccaagggaagctgtgacagatggcacctggaaaattgggtcactcccatcctaatactgcgcttttccaatggtcttagcaaacggcacaccaggagattatatcctgcacctggctcagagggtcccacacccacggagcctcgctcattgctagcacagcagtctgagatcaaactgcaaggtggctgcaaggcagggagaggggcacccgccattgctgaggcttgagtaggtaaacaaagcggccaggaagctcgaacttggtggagcccaccgcagctcaaggaggcctgcctgcctctgtacgctccacctttgggggcagggcaaagacaaacaaaaagacagcagtaacctctgcagacttaaatgtccctgtctgacagctttgaagagagtagtggttctcccagcacagagtttgtgatctgagaacggacagactgcctcctcaagtgggtccctgacccccgagtagcctaactgggaggcacgccccagtaggggcagactgacacctcacacagctgggtacccctctgagaccaagcttccagaggaacgatcaggcagcaacatttgctgttcagcaatattcgctcttctgcagcctctgctgctgatacccaggcaaacagggtctggagcggacctccagcaaactccaacagacctgcagctgagggtcctgtctgttagaaggaaaactaacaaacagaaaggacatccacaccaaaaccccatctgtacatcaccatcatcaaagaccaaaggtagataaaaccacaaagatggggaaaaaacagagcagaaaagctgaaaattctaaaaatcagagtacctctcctactccaaaggaacgcagctcctcgccagcaacggaacaaagctggacagaaaatgactttgacgagttgagagaagaaggcttcagatgatcaaacttctctgagctaaaggaggaagttcgaacccatcacaaagaagctaaaaaccttgaaaaaaaaggttagatgaatggctaactagaataaccagtatagagaagtccttaaatgacctgatggagctgaaaaccatggcacgagaactatgtgacgaatgcataagctttagtagccgatgcgatcaactggaagaaagggtatcagtgattgaagatcaaatgaatgaaatgaagcgagaagagaagtttagagaaaaaagaataaaaagaaatgaacaaagcctccaagaaatatgggactatgtgaaaagaccaaatctatgtctgattagtgtacctgaaagtgacagggagaatggaaccaagttggaaaacactctgcaggatattatccaggagaacttccccaacctagcaaggcaggccaacattcaaattcaggaaatacagagaacgccacaaagatactccttgagaagagcaactccaagacacataactgtcagattcaccaaagttgaaatgaaggaaaaaatgttaagggcagccagacagaaagttcgggttacccgcaaagggaagcccatcagactaacagctgatctcttggcagaaactctacaagccagaagagagtgggggccaatattcaacattcttaaagaaaagaattttcaacccagaatttcatatccagccaaactaagcttcataagtgaaggagaaataaaatcctttacagacaagcaaatgctgagagattttgtcaccaccaggcttgccctacaagagctcctgaaggaagcactaaacatagaaaggaacaaccggtaccagccactgcaaaaacatcccaaattgtaaagaccatcgatgctaggaagaaactgcatcaactaatgagcaaaataaccagctaacatcataatgacaggatcaaattcacacataacaatattaaccttaaacataaatgggctaactgctccaattaaaagacacagactggcacattggataaagagtcaagacccatcagtgtgctgtattcaggagacccatctcacatgcagagactcacataggctcgaaataaagggatggaggaagatctaccaagcaaatggaaaacaaaaaaagaaaagcaggggttgcaatcctagtctctgataaaacagactttaaaccaacaaagatcaaaagagacaaggccattacataatggtaaagggatcaattcaacaagaagagctaactatccaaaatatatatgcacccaatacaggagcacccagattcataaagcaagtccttagagacctacaaagagacttagactcccacacaataataatgggagactttaacaccccactgtcaacattagacagttcaacgagacagaaagttaacaaggatatccaggaattgaactcagctctgcagcaagcggacctaatagacatctacagaactctccatcccaaatcaacagaatatacattcttctcagcaccacatccaaaactgaccacatagttggaagtaaagcactcctcagcaaatgtaaaagaacagaaattataacaaactgtctctcaggccacagtgcaatcaaactagaactcaggattaagaaactcattcaaaaccgctcaactacatggaaactgaacaacctgctcctgaatgactactgggtacatagcgaaatgaaggcagaaataaagatgttctttgaaaccaatgagaacaaagacacaatataccagaatctctgggacacatttaaagcagtgtgtagaggaaaatttatagcactaagtgcccacaggagaaagcaggaaagatcaaaaattgacaccctaacatcacaatttaaagaactagagaagcaagagcaaacacattcaaaagctggcagaaggcaagaaataactaagatcagagcagaactgaaggagatagagacacaaaaaaccctttaaaaaatcaatgaatccaggaactggttttttgaaaagatcaacaaaattgatagaacactagcaagactaataaagaagaaaagagagaagaatcaaatagacgcaataaaaaatgataaaggggatatcaccaccaatcccacagaaatacaaactaccatcagagaatactataaacacctctatgtaaataaactagaaaatctagaagaaatggataaattcctggacacatacaccctcccaagactaaaccaggaagaagttgaatccctgaatagaccaataacaggctctgaaattgaggcaataattaatagcttaccaaccaaaaaaagtccaggaccagacggattcacactcaaattctaccagaactacaaggaggagctggtaccattccttctgaaactattccaatcaatagaaaaagatggaatcctccctaactcattttatgaggccagcatcatcctgataccaaagcctggcagagaaacaacaaaaaaagagaattttagaccaatatccctgatgaacattgatgcaaaaatcctcaataaaatactggcaaaccaaatccagcagcacatcaaaaagcttatccaccatgatcaagtgggcttcatctctgggatgcaaggctggttcaacatacgaaaatcaataaacgtaatccagcatataaacagaaccaaagacaaaaaccacatgattatctcaatagatgcagaaaaggcctttgacaaaattcaacaacacttcatgctaaaaactctcaataaattaggtattgatgggacgtatctcaaaataataagagctatttatgacaaacccacagccaatatcatactgaatgggcaaaaactggaagcattccctttgaaaactggcacaagacagggatgccctctctcaccactcctattcaacatagtgttggaagttctggccagggcaatcaggcaggagaaagaaataaagggtattcaattaggaaaagaggaagtcaaattgtccctgttcgcagacgacatgattgtatatctagaaaacaccattgtctcagcccaaaatctccttatgctgataagcaacttcagcaaagtctcaggatacaaaatcaatgtgcaaaaatcacaagcattcttatacaccaacaacagacaaacagagagccaaatcatgagtgaactcccattcacaattgcttcaaagagaataaaatacctaggaatccaacttacaagggatatgaaggacctcttcaaggagaactacaaaccactgctcaatgaaataaaaggggatacaaacaaatggaagaacattccatgctcatgggtaggaagaatcaatattgtgaaaatggccatactgcccaaggtattttatagattcaatgccatccccatcatgctaccaatgactttctttacagaattctaaaaaactattttaaagttcatttggaaccaaaaaagagcccgcattgccaagtcaatcctaagccaaaagaacaaagctggaggcatcacgctacctgacttcaaactatactacacggctacagtaaccaaaacagcatggtactggtaccaaaacagagatatagaccaatggaacagaacagagccctcagaagtaataccacacatctacaaccatctgatctttgacaaacctgacaaaaacaagaaatggggaaaggattccctattgaataaatggtgctgggaaaactggctagccatatgtagaaagctgaaactggatcccttccttacaccttatacaaaaattaattcaagatggattaaagacttaaatgttagacctaaaaccataaaaaccctagaagaaaacctaggcaataccattcaggacataggcatgggcaagaacttcatgtctaaaacaccaaaagcaatggcaacaaaagccaaaattgacaaatgggatctaatgaaactaaagagcttccgcacagcaaaagaaactaccatcccagtgaacaggcgagctacaaattgggagaaaatgtttgcaatctattcatctgacaaagggctaatatccagaatctacgaagaactcaaacaaacttacaagaaaaaaagaccccatcaaaaagtgggtgaaggatataaacagacacttctcaaaagaagacatttatgcagccaacagatacatgaaaaaatgctcatcatcactggccatcagagaaatgcaaatcaaaaccacagtgagataccatctcacaccagttagaatggcgatcattaaaaagtcaggaaacaacaggtgctggagaggatgtggagaaataggaacgcttttacactgttggtgggactgtaaactagttcaacaattgtggaagacagtgtggcgattcctcaaggatctagaactagaaataccatttgacccagccatcccattactgggtatgtacccaaaggattataaatcatgctgctataaagacacatgcacacgtatgtttattgcggcactattcacaatagcaaagacttggaaccaacccaaatgtccatcaatgatagactggattaagaaaatgtggcacatatacaccatggaatactatgcagccataaaaaggatctgttcatgtcctttgtagggacatggatgaagctggaaaccatcattctcaaaaactatcacaaggacaaaaaaccaaacaccgcatgttctcactcgtaggtgggaattgaacaataagaacacttggacacaggtaggggaacatcacacaccggggcctgtcatggggtgggtggacaggggagggatagcattaggagatatacctaatgtaaatgacgagttaatgggtgcagcacaccaacatggcacatgtatacatatgtaacaaacctgcacgttgtgcacatgtaccctagaacttacagtataataaaaaaaaagaaattgcaaaattacacattctttgtaagcacacaaaggaaacatgttagaattttccattttaagctacaaataagctacaaataaagtagtctcaaatttcagataatataaaacatgttttctggtcacaatacaattaaagttgatataaataagaaagataactataaaatcttcctatgttagaatcaagaactatacttttaaacccatgtgtcaaataagaaatcataaattagaaaatattttaaactgaatgataacaaggcatgacatattaaaatgtgggaatcagctaaagcaatatttagaaagaaatgtatagcgttaaaaacatatattggaagagaagaaagcctgacaattaatgagctaaggtatgtctcaagaagctagtgaaacagcaaaataaaccaaaaggaagtagaagcaaggaaataataaagatatgaagtaaatgaagtaaaaaagaaacatacaatagagagaataaagaaaaccaaaagttggttccttgaaaattgacaaacttctggcaagagcaatcaagatgaaaagaaggcacaaataatatcagaaactttaaaaaactggacatcaataaagatcccacaaaaatttctgccaatataaaaatataaaaaatgaggatacttattaatattaaatgttctttcttgttgtatttaccagggattaatccattttacctaattttccaaacttagtgttaaaaggttattaatttaaaaaatccagatccagatggctacactaactatattctaccaatttttcaaaggagaaataatattaaccttgcaaaaattctttcagaaaatggaaaaagatggaatgttattcaattatcttatgataatagcataaccttgacaaccaaaccgaacaagaacaatattagaaaggaagataataggcccgttttattcataaacataaatcccaaacaaaatattagcaatatggatccaaattggatttatgctaggaatgcaagtttggcttatacattagaaaactgatataatttatcacagtgacagactgaaggattatacatattggctgtcctaagcagtgcaataagatgagaaaaagaaggaaaatatgtaaggattgaatatgatgaaacaaactcattgtatgtggaagatatgatggcatagatagaaaatccaaaggaatttatatataaattattagaatttttaaaatttttcaagcttgctgaaaacaaaataaataccaaaattaattgtatttctgtatacctgaaacagttggaaaaatagttttaaatagcatttaaaaattccaagcaggagttgcacattcctgtcagataatggcagctgcctaaatctctccacagtcttcaaaaaccatacatacacatacacacacaattttaaattatgactaaaaccacccataacccatctatagaataaccagaagacaaaaagtactataagtttatatttacaagtagaaaataaatatataaatctagccaaccttgctccagagagaaaccctgtctcaaaaaaaaaaaaaaaaaaaaaaagaagaaagcaaatgttggaaattaactgtcctataaaaacaaaagtgaattactaaatcacaagacccacaaacctctttggtcacatctattaaataaattacacttccatttatcaacagtagagggtactcctggctaagaaacctagtaagccacccagccctcatgtctgcctgcataaatcacctcttattgctgaaacaagaaaatgtaaggaatttctaaatgaacagaaaatagcatatgaagcagatggtattaatgttcttgagtttttattccctctttccttgaaaacctcatcaactttaggcatggccgtacggctcatcttgatcaatagaatgtgattggacatgacatatataccacttccaaatagaagctttaaatgtgattttgtgtttgacacactcttttgtgcctctgctccaggctccagactttaagcctctagaacgataagtgaataaatttcttttgttttaaaggcaccaagtgtgtggtgaatttgttacagtagccctagaaatctaatactaacaaaaagaatgttagagttgaattagaagtgtcagtgagaacttaggaatttaaaaaatcatattcttagcactgttcactgagggaatctagaagtaattacactgcagtaataacgagcccatcccatgcccaaatcttggtctctaactaccattttccagtcaaaagaatctgagctccctagagaaatgactttttcaaggctggatcaaggaaactgccaggcaatcttagatgatcttggtgatcttgatgtgccagaagattaatgggatcatgtgaaaagaacacagaaactggtctgaagggcttcctgttggccagatttgagacaatttgagcatcaaaaggaataatgagggtaatggatcataactggaaaatcagtttgcaaccatcaatgtacttactattgaatacttgtaaagaactttaagggttgctaataccattggataaaagcttgttgtgaaacagaatatttgcatggtctcaaagtctcactccacagattgttaggaaagggaaagggttacctttataaatatagagattaggtggacatcttaaccaagtgatcaaacttagcatcatcaataatgggacaatctggcatcgcatgccccctgatttaatgcagtaaggattaagtctaacaaaagatgtacaaagcctccaaatacagcgtaaacatttgtaaaataatctcagaacagggaccttaatgtttctcaaaaatttttccaaatacagaactttatttctatagatgtttatggtatatttgccatgctatatacattatgctatatattctatgtgctgaagatacaacaatgaccaaggtctttgcccttgtggaactgacatttggtggcggagacagaggaaacagtcaataagcatgtaaagagataaaggaaaagatactgaatgctacaaaggaaacaaataagttgagatttagaacaaaaaagagtcctattttacaagaggaataatgaggaagacctttctaaagaggtagctcagcactttgggaggccgaggcgggtggatcacgaggtcaggagatcaagaccatcctggctaacacagtgaaaccccatctctactaaaaatacaaaaaatgagccgggcatggtggcgggcacctgtagtcccagctacttgggaggctgaggcaggagaatggcgtgaacccgggaggcggagcttgcagtgagccgagatggtgccactgcactccagcctgggcgacagagcgagactccgtctcaaaaaaaaaaaaaaaaattgaggcagaatttcgctatgttgcctaggcttgtctcaaactcctgggctcaagcaatcctcctgcctcagcctgctgagtagctgggactccaggggcatgccactatgcttagtttaagaggtggtatttaaactgagacccgaagggtaaaaaacatggataaaagaagaaacagaaggggtaagagccttccaagcagagggaatcacatatacaaaggctctcatgttaaataaaacaagagttgacattgttgagaaactgaaagatcagctcatctgcgatgcggtaaaataggaggaatgcagtgggagaacagatcagagacttgggcaggggctatattaggcagaacttggagaccagagtaagggggccaaggtgggaacagaccgattaaattggcatctcttgggggggtgggggggtggggaacttacccatgcatcattttttaaaagctccaaaggcgattccaataagcagccagggttgggaacctagggggaaaatgtagctagatgaatgaagatggcccaaacgtcttttgttctgatagctaaactctctgtaggatcacagtgttacttcacagtgcatttgccaggaaaagtctcttcccatttggaatccgaagtaaaactgacaccacacttgaagatgccaggattgttagaggaaaatgtcacccaatagctccaggaagcaggagccctactgttgctgtttaaccacttctttcccattttggtggcaagttgcctccttttacacaaactgcctcaggagatcctaaagatatcatggtgtctgtctgtccttgcaagagcatgcattatggtaggacattgccttcattctgttcctttttctccaagactcttgcttattctcaccatttggctggactttctactgtaggattacctcggaatccacacaaaacccacagggtttcagagttgccttgaattacacgttttgaacattcagatcttcattttcccaaacatccacccagttataggtgacctttgctccaaagtcctggagtagcaaggtgccttgagtcttagactcttcccacttctttctctcttctgcatcccctcctgccaaggttgcccagccacactaaattgcatgccttgctgtgttgcattcgttatcattctaaagttgtcaccaacatgtgcgaaaccagtttatctaataacgatagctaccattttctgagctcttgccatgtactcctcttgccacagcaaatgcattgacaagggagtctgctggccaaagcctgactctcatctccagatggtccaacacagatgctgtgtgtgacccaggacaaagcacttaatgtcactgaggtttgggaagtgggtgagaacactgtagatataaggcctagctagagtgaaggcctccaaagcagggtgctcttaattctagatgtcccagatgcgtaggacagagtcatctagtcatcttccagggtttaatcctggactactggaaacaactagaagtgagaaaagcgtctgtgctttgcagtgaccattgtcctgtcagacaaccaataaatgctatctttcctctttcaggtttttcagggaaatcaagactccttcacacctgtggtgaactctctagacccaccgttactgactcgctaccttcgaattcacccccagagttgggtgcaccagattgccctgaggatggaggttctgggctgcgaggcacaggacctctactgagggtggccactgcagcacctgccactgccgtcacctctccctcctcagctccagggcagtgtccctccctggcttgccttctacctttgtgctaaatcctagcagacactgccttgaagcctcctgaattaactatcatcagtcctgcatttctttggtggggggccaggagggtgcatccaatttaacttaactcttacctattttctgcagctgctcccagattactccttccttccaatataactaggcaaaaagaagtgaggagaaacctgcatgaaagcattcttccctgaaaagttaggcctctcagagtcaccacttcctctgttgtagaaaaactatgtgatgaaactttgaaaaagatatttatgatgttaacatttcaggttaagcctcatacgtttaaaataaaactctcagttgtttattatcctgatcaagcatggaacaaagcatgtttcaggatcagatcaatacaatcttggagtcaaaaggcaaatcatttggacaatctgcaaaatggagagaatacaataactactacagtaaagtctgtttctgcttccttacacatagatataattatgttatttagtcattatgaggggcacattcttatctccaaaactagcattcttaaactgagaattatagatggggttcaagaatccctaagtcccctgaaattatataaggcattctgtataaatgcaaatgtgcatttttctgacgagtgtccatagatataaagccatttggtcttaattctgaccaataaaaaaataagtcaggaggatgcaattgttgaaagctttgaaataaaataacaatgtcttcttgaaatttgtgatggccaagaaagaaaatgatgatgacattaggcttctaaaggacatacatttaatatttctgtggaaatatgaggaaaatccatggttatctgagataggagatacaaactttgtaattctaataatgcactcagtttactctctccctctactaatttcctgctgaaaataacacaacaaaaatgtaacaggggaaattatataccgtgactgaaaactagagtcctacttacatagttgaaatatcaaggaggtcagaagaaaattggactggtgaaaacagaaaaaacactccagtctgccatatcaccacacaataggatcccccttcttgccctccacccccataagattgtgaagggtttactgctccttccatctgcctgaccccttcactatgactacacagaatctcctgatagtaaagggggctggagacaaggataagttatagagcagttggaggaagcatccaaagattgcaacccagggcaaatggaaaacaggagatcctaatatgaaagaaaaatggatcccaatctgagaaaaggcaaaagaatggctacttttttctatgctggagtattttctaataatcctgcttgacccttatctgacctctttggaaactataacatagctgtcacagtatagtcacaatccacaaatgatgcaggtgcaaatggtttatagccctgtgaagttcttaaagtttagaggctaacttacagaaatgaataagttgttttgttttatagcccggtagaggagttaaccccaaaggtgatatggttttatttcctgttatgtttaacttgataatcttattttggcattcttttcccattgactatatacatctctatttctcaaatgttcatggaactagctcttttattttcctgctggtttcttcagtaatgagttaaataaaacattgacacatacaaacaaatgcctttgagaattgtgtttttacactggaaataaaaatgtgaacactgatttttaaaacaaataggggcactgaatagcaagatggacactctagaaaaccaaattagtgagttagaaaaccagattaaattgaactcagagtaaaaatgatataattcatgagagtctgaataaaataaatcagaaatggagcctcaatccaggagaacagcttatatggagagagagagactgagagagaaatgggagtttctgttcaatgggcataaagtttcagctatgctgctgggcacagtggctcatgcctgtaatcctggcactttgggaggccaaggcgggcggatcacctgaggtcgggagttcaagaccagcctagccaacatggcgaaatcccgtcgctaataaaaatataaaaattagttgggcatggtggcacatgcctgtagtcccagctacttgggaggttgaggcacaagaatcgcttgaacccgggaggcgggtggaggttgcagtgagccaagatcgtgccgttgcattccatcagcctgggcaacagagtgagactccatctcaaaaaaaaaaaagtttcagttatgcaagatgaattaagttctacagatctaatgtacaacattgtgcatatagctaacgataccatactgggcacttaaaaatttgttaagagagcagataccacgttgtgttcttactacagttttacaacaatgcaaaaatgcattgtaaacactatgtgcaaatagaatagcaaagaatgtatacagtgcccatgagcataacattctagtggacccacaatgcatcagagttcagtgagactcaaagggagaagaatgttggcaaagtcagtggggaggagaaaatgagtgtgatgaaataggcggtctcattaaacttcccttacaaaacacaagatcaaagataaaattattaagaatttcgagacagtgacatcagagcaaacgaaacatagg

SEQ ID NO: 3 - DNA, 188930 bp, Artificial Sequence
  synthetic construct
tcaccatggctacattctgatgtaaagagatatatcctatacctgggccaaatgtaaacagcctggaaaagtgttaggttaaaaacaaaacaaaataaataaatgaataaatgccaggtggttatgagtgctattgagaaaaatgaagccaagagggatatcagtgatgcaggtgggggtaaagagcttacaacataaatgtggtgttccatatttaaacctcattcaacagggaagattggagctgaaatgtgaaggagttgtgggagtggaactacgtggaaatctgggggaaaggtgttttgggtaaaagaaatagcaagtgttgaggtccaggggcatgagtgtgcttgatattttagggaagagtaaggagaccagtataaccagagtgagatgagactacagaggtcaggagaaagggcatgcagaccatgtgggatgctctaggacctaggccatggtaaagatgtagggttttaccctgatggaggtcagaagccattggaggattctgagaagaggagtgacaggactcgctttatagttttaaattataactataaattatagtttttaaaacaatagttgcctaacctcatgttatatgtaaaactacagttttaaaaactataaattcctcatactggcagcagtgtgaggggcaagggcaaaagcagagagactaacaggttgctggttactcttgctagtgcaagtgaattctagaatcttcgacaacatccagaacttctcttgctgctgccactcaggaagagggttggagtaggctaggaataggagcacaaattaaagctcctgttcactttgacttctccatccctctcctcctttccttaaaggttctgattaaagcagacttatgcccctactgctctcagaagtgaatgggttaagtttagcagcctcccttttgctacttcagttcttcctgtggctgcttcccactgataaaaaggaagcaatcctatcggttactgcttagtgctgagcacatccagtgggtaaagttccttaaaatgctctgcaaagaaattgggacttttcattaaatcagaaattttacttttttcccctcctgggagctaaagatattttagagaagaattaaccttttgcttctccagttgaacatttgtagcaataagtcatgcaaatagagctctccacctgcttctttctgtgccttttgcgattctgctttagtgccaccagaagatactacctgggtgcagtggaactgtcatgggactatatgcaaagtgatctcggtgagctgcctgtggacgcaaggtaaaggcatgtcctgtagggtctgatcggggccaggattgtggggatgtaagtctgcttggaggaaggtgcagacatcgggttaggatggttgtgatgctacctgggccccaaagaaacatttctgggtaaggtgtgcacacatctgtgttattagcagaaatgctaactgccaattcttttcataggtctgacctatttgttgatattttgttctgttttgtccattgcttctcttcgtcatatgctgctcctccagaatctagagactggagtagagggagggtgaagggacaaagacaaaacttccctctgcctgcccaagcttccatagagagaatcaaggcaatgaaatccaatcaatatcacacacaagtttcatgtctggttctcttgtgtgtacatgcaatgtgtgtttttataatatcttttcctactttgggtgtaaggataatatgagccttgagttcagaagcttttcgtgttttgggggttctggtgcatttaggcagagtattaaataactttatcaatattgtctatggtcatcagttgattcagatttttctacctcttcttcagtaaatattggtatattttggtctatactttcatagaaagcaatctactgtccctagatttgataatgtattggtatcaagttatgtaagagtctcctgtgattttgttaaactgttctgtgtctgtagttatattttctttttcattccttatgttgtatatgttctcttcctctcttttaaaaataatatttccaggagttttcttgattttattggtcttgtcaagaattttcttttggtttgatttatcaatctcttttttctttctgttgcatcagtttctgcttctactttcattgatttattccttccttctaatttcctttggttcattttgttgttagatttttgcttcttgagttgaatgctgaaatcatttattttatttttttgtcttctttaaatgtgtattataaagatttaaatataatacatagattgtggctgtgtaaacattaaatgtggtcatgttgtacatactttatattctttttggttctttctgtttggctccccaccctctttccacatcagtccccttctcccccacctcagctaggtaaccccagtatgataatatatattcacatacacatacacacacacaaaggttttcttggacattatttgttttataaaattgggacattatacacacatttctcactcattaacacgtactagaactctaagtcaattggtatagctttaattcattatttttattggctatataagattctatggtatggctgtatcacaatttagtcaatatgttcactttattccagtttttggctactatatcctatatcattacatactggtgcttttacttctgttgaacaaacttgcaagaggaatattaatggaacgaagggaatgtttccttctaagttttaatttccaaagaggtcagaacttttcaaacatttctaccatcgaagtatgaaaatggccttctctctgcattcacatagcgataagttttatcctgtttttaaaatttgccaattttacaggtgtagagtgatattgcatcattactttcattgtgttatttttatttctaataagttgagcatctttttaaatgcttgttggctattggatttatttgggggatttaattagtcatatgatttgcccattattctttggactctttcatttaaaaaaattatgagaacccttttattattacaaatattaactctttgtcatgtatattgcagttttccccaagatctattgtttgtctgttgactttcttataacttttaccaaaacagtttttaatttttataatcagagatatcttttctttcatatcttcagagtcggcaaggttggttaaaaatgtttcccacacctcaagattgtacgtgtaatctcccagattttcttgcaagatgtttactgtttcgctttttatatgcattgcttcaattatctgctaattacttttgtcatatggcatgagagagggatttgtctagttttatttccatccagatcaatagcctattgtgatggcaccttttgccactgatttgaatcaacacattcatcatataaagttctcatatatattagcatatatttctggattcattaggctgtttcactaatctactattatcttgctatgccagtaccatagtgatttgattacagtgagcctatgatatcttctgatatctggtgggtgaaagcaatcctcactattctttttgtacctttcttagctattcttagacactttattcttccacataaaactgttaagatatttttcaaattaaaaagatccaagccctgttgtgattctaactgcaatttcattaaactcagaccttaattttattaatgtaataaatttaaatatttttcttattacatttatctctgtgtattttataagtgtgatgctattgttaataagatagttttctcctatttccatttatgagtgcttagtaccaaatagagataagctattggtttgtgtattttcagctttttcttttgagcctgggtctcattttgtcacccaggctggagtgcagtggggtgatctcaccttactgcagcctcaacctcctggattcaagcaattctcctgtatatcagccccccaagtagctgggactacaggagcaggccaccatgcccggaaaatttttgtatattttttagagatgggtttttgccatgttacccaggctggttttcaactcctgagctcaagcattccccccacctcagcctcccaaagagctaggattacaggtttgagccaccgcacccagccattgtatattcatcttaaatctagctaccttaccaaatttgcctattaattctagtaattttaccctaaagtctctgtgagtattgaatcatatcataagttaaatgagacagattttagctcatttccaatatttatagccagttatttcattttcttatcttattgaatttattagaaaacaagagcaaatgttaaataataacaatgaaagtgaacattccttctactctatgattttacttgaaataatttttgtattttgctatttagagtaacatttgctgttttggtttttgtaaatggtgtttattctattctcatttgccacaaaatgtttatcataaataagttttcagcagctggtatcatctgaattgtcttctttgatatgctgatgaacaaattatgttcatagatgtcctgacactaaatacccttacattcttggagtaaaatctactattcatggaatttgatcattagtgggttctatgtactatttctttagactattcttagtagattttcactactcaacctactaataataataaacaaagttttgttggctttatcaaatgaattgatgagtactccatctttttctattgcttagaatagcttaagtaacatttgaattatccattgtctaaaagttaggtgagactcacttatgaatccatttggtcctagtggcatttgcaatatctttaatcacccctccaggctcttctatgataatcagtcaattcaagtttcaacttccaataattatatacctttctaggaagtaactttatttattttttcaattttgttgccacagtgttgcatgtagcactcactcatgattcttttactccacattatctgtagttatgtgccctttcttattcctaaattcctctatctttgctatttatctttttttccttgaataagcttgccaatgacttgtctattttgttgctggtggtgctcttttcaaagaatgggcttttggattttttttttttctagttggtataaagcatttttattttcactgagcagaaaaagaagctattgattcattaactgtgctgctttattggcatgtagctatgcactgttcacacattaatatataaaactcgtcagtctgttttattttgtctgatgggaaaacatgaacagtgagatttcttatgcaaaaagtgaacagttcaactatgctagctccatatacctttattaacattccagagacttatcctctcaacatgatctgatttctgtaggataacttttcaggaaaagtattttctgatcagtgaagcttggagatataaataagcaatcggccaggtatggtggttcatgcctgtaatcccagcactttgggaggccgaggcaggcagatcacctgaggtcaggagtttgacaccagcctagccaacatggcaaaactccgtgtctaccaaaaaaaaaaaaaaaattagctgggcatggtggtgctcacctgtaatcccagctactgaggaggctgaggcaggagaattgcttgaacctaggaggcggaggtggcagtgagctaagattgtgctcagcctaggtgacagagtgagactccatttcaaaaaataaaaaaataaaaaaaagcagtatctctcatattcattaactggaccctgactttcttaaagctcaccccaaagctgaagtccatgaaggcactagttctcaaacttcagtgtgcataagaatcactcgggaagcttattaaaatttacattcctaggccccatcctcagcaaactatttagtccccaggtaattctatcccaccccaccccagctttattgtggtataattgacaaataaaagttgtatatatttaaggtgtacaagataatgttttgatgtaagtatacattgtaaaatggtatagcatgaagggttttcttttcatttttttcagaatagtttgtaatatcttctttgatttcatctttgataatctagacgtatgattttaattgctttttaaatttgtttatcaagttagtttgtagtatttgggtcaacattgaatatcctgttaatttcctattgctgtgtaacaaactacatcaaatgtatcagcttatgacagacccatttactgtctcacagtttctgtgagttagaagtccaggtggactcagctggatactctgtgcagggtcatacaaggccaacaccaaggttttaatagggctgcactccttagtgaaagctcttggggagaatctgcttacaggctcatttggaatgttagcaaattcagttccttctctcactttccatgtagtgccctctaccagcaatggtgcatcaacactctctcatgcttggaattgctctgacttcaattttccgtgcatatctctggccttttttgcctctctcttttacttttaaggactcatgtgattacattgggccgacctgggtaattcagaatactctccccatctcaaggtcagctaatcagccccttaattccatctgcaaagtttaatttgccacataatatatttttggacatgacaccaaggagcaaaggtgatgtgggccaaatttttacctgccacaggtatagtttacatacaatgaagctcatcaattttaaatatgcagtttgatgagttttgacaaatgcatacacttgcataaccaccaccctaatcaacatgcatttacatcaaccctcctgcaactttttaatgagtctctcccactgacctggcctcagccaataaactgctatctggaagttacagatttgttttcacatgttctagaattttacatcagtggaatcatacggtatgtattcttctatggctttttttcttcagcatcatgatttggaaattcatgcaggttgttgtataaagtatttctatcctttttattgctgattactgctccattatgggattatatcataattttggattatttccagttaggagcaaatacaaataaacctgctatgaacagtgctccacatgttttgtgtgaacatctattttcatttatcttagttaaatatctaggagtggaattgctggatcatatggtaagtgcatgtttaagagaaactgccagacagatttcttgaacgtaccattctatactcccaccagcaatgcatgagagttccagttgcaatatatcctggacaacatttgatgttgccagtacttaatgactgcacagtggtatctcactatacttttttttttttttgagatggaatctcatcccatcacacaggctggagtgcagtggcgcaatctcagctcaacatctgcctcctaggctcaagcaattctcatgcctcagcctcctgagtagctaggactatggtcacacgccaccgtgcccagctaatttttgtatttttggtagagacggggttttgccatgttggccaggctggtctcaaactcctggcctcaagtgatccacccgcctcggcctcccaaaatgttgggattacggcttgagccactgcacctggttatacttttaatttgcgtgtctctgatgactaaagatgttgagcatctttgcatgtgctaattagccattcctatatcttcttggaagtgtctattcaaatcattggtcctttgtttttaaacgtagtttcaacttttattttagactgaggaggtacatgtgcaggtttgttacatgagtatgttgcatggtgctgaagtttgggttacgaatgaatgatcctgtcactgaagtagtgaacatagtacccaataggtggtttttcactccttgctacccttcctcctccctctttcctctagtcgtctccagtgtctattattctatgtccatgtgttctcatcatttagctcccacttctaagtgagaacatatggtatttggttttcagttcctgtgttaattcacttaggataatggtttgccagtttttaattgggttgtttgtcttgttattgttgagttttgataattttttatatattctgggtacaagactattcagaggtacctgttttgaatgtttttttccaatctatggcttgcattttcattttccaaatggtgtctttcaaatagtggaaatttatagttgtagttaagtccaatttagcttttcttcttctatgattcatgcttttttttcccctgtcctaggaaatctttgcccacctcaagttcacaaagcctttcttctgttttcttctagaacttttatcattttagcattagtatttaggtttataatacattttgagttaaattttctgtatggtgtgacttttctttctctattgaattcccttggtgcctttgtagaaaattaaatgactgtatataggcaaatctgtttatggattctctagttccatagatgtgtatatctgtgcttatgccagtaccagattgttttgattgttgtaactttatagtaagtcttaatatcaggcagtctaaaacctccaacttacttttttattgaaattgcttttgatatatttaggcttttatatttctgtattaattttatagtcaactagccaactccaccaaatagccaactgggattttgactggaattgaattgaatctgtagatcaatttggggagaattgacatttaaacaatactgaatctttcaatacaacaacatggtatggctttgtttctttaaattttctttaatttccctctaggatattttgtagcctacagagtagttcttgcaagaattatattaattgtatccccaagtattttgagggattcgatgctattgttaattgtatcatttttatttgttttcgttttccaatcatttgttactaaaatatagaaattcaattgatttttgtatattgaccttgttcactctaatcttgttaatttgcattttagctctagtagcgttttgcacttcttttagaatttctacatatacaataatgttgtctgcaaataaagacagtttgcttcttcctttccaaactggatgctttttattttttttttcatgccttactgtactggcaagggcctccagtacaatgttagatagaactgatgatagcagaatccttgtcttcttcctgatttcagagggaaaatattcattattttaccattaagtacaattacttgtaaattttttcatagatgccctttgtcaaattgaggaagtttccttctattcttggtgtgagagtttttatcaagatttgatattagattttgtcaaatgctttttctgcatctattcaaatggtcatatggtttatcttgtttattctgttatggtgaattaccttgattgattttttaatgaggaactagctatgtattcccagggaaaaaatccacctggttgtgacatattacattggtaatattttcgctatggactgaattgtctccacctccccccaccccaaattcatatgttgaagtcctaactctcaagatgattatatttggagatagggcttttaggaggtaaacaaggttaaatgaggccataaggatggagtcctaatctgataggactggtggcctcataagaagagagaaggttctctctctacactcatgcactgaggaaaagccatgtgaacatacagcgagaaggcagccatctaccagctgggaagagggctccactagaaactgaccgtgctggcaccctgatattggatttccagcctccggaactgtgagaaaataagtttctgttgtttaagtcacccaatctctagtattttgttatggcagccctggccaactaaaactgttttgttaagggttttggtggtgatggtggttttttagtttttgcgtctgtgttcatgatggatatttggctgtgattttcttataatgtcattgtctggttttgatataagagtggtattagtccgttctaatgctgctatgaggacatacccgagactgggtaatttataaaggaaagagatttaatggactcacagttccacatggctggggaggcctcacaatcatggtggaaggcaaaggaggagcaaagacacatcttatatggcatggtggcagacaagagagcattgtacaggagaactgccctttataaaaccatcagccctcatgagacttattcactataatgtgaacagcatgggaaaaccccactgccatgattcaattacctcccacctggtccctctcacagcacatggggattgtgggagctacaattcaagatgagatttaggtggggacacagccaaaccatatcaaagagtaagactattctttttttttttttttttttttttgagacggagtctcgctctgtcacccaggctggagtgcagtggtgcgatctcggctcactgcaagctccgcctcccgggttcacgccattctcctgcctcagcctcccgagtagctgggacgacaggcgcccgccaccacgcctggctaattttttatactgatagtagagacggggtttcaccgtgttagccaggatagtctcgatctcctgacctcatgatccgcccacctcggcctcccaaagtgctgggattacaagcgtgagccaccgcgcccggctgactattcttataaaatgagttgagacgtgttcactcttctatttaatgaaagagtttgtgtagaattggtatcatttcttttttaaatgtttattcaccagggaaatcatcttatcccagtgttttttgttttggtttggttttttttttaagggtcttaattgtgaattctatttttaataggtaaagggctatttgaattttctatttcttataggataaattttaataatttcttttaagaaattccatttgagactgggcatggtggctcacacctgtaaccccaacactttgggaggaggcagcaggattgctctaggccaggagtttgagatcagcctgggcaacataacaagacttgacttctacagaattttttttcattagccaagtgtggtaacatatgcctgtagtcccagctacttggaaggctgaggcaggaggatcacttgagcccaagagttcaaggctgcaattaactatggatcatgctactgcactccagcctgagcaacaaagcaaggctctgtctcaaaaaaagaaaagaaattccatctgagctgttgaatttaatagtataaagttcagaatatttccttaccattttttcactccttggaggtatgatttacatactgtaaaaatcacttattttcagtgtggagattcttttcctttcctaaatctccacatttttattgacatatactttacatatcataaaattcaccatttgaaagtgtacaattcagtggtttttagtgaatccgtaaagtgtacaactatcatctttatttaattccagaatattttcatcacctcaaaaagaaaccctgtaatcattaaacagtcacttctaattttcttcctttccccagcccctggcaaccattaacctactttccgtcactgtggttttgcctattctggatatttcatgtaaatgaagggataaaatatgtggccttttgtgtctagcatcttttgcttagcatgttttcaagattcttccatttttgcagaatgatagaggagttaaaataagaaaataaagatatagtaagaatgaaactattttcattttttaatttaaaaaaatcttccatgttgtagtatgtatcagaatttaactcctttttatggctgaataatactccattgtatggatagaccacattttgtttatccattcatctgttgatggacttttggattgtttccccttttggctattatgaataatgctgctatagaacattcatgtacaagtctttgtgtacatatgcttttatttctcttcggaatatacttaggaatataattgctaggtcacatggtaattctatgtttaacttttagaggaactgccagactttttcaaagcagctgcaccattttacattttcactaccaaagtatgagtgttccaatttttccatattcttatcaacacttgttactgtctgtctttttaattatactcatcctagtgtggataaagtgatatctcattgtagtttggatttgcatttccctgatgacttacgttgttgagagtcttttcatgtgtttattgaccatttgtgtatctcctttggagaaatgtctatttaaatgctttgcgtgtttttaattggattatttgttttttagtactgagttgtataagttctttatttattcttaatattatacccttatcagagctatgacatgaaaatattttttcccattctgtgggtagtattttcactttcctaatagtatcctgtgatgcacaaagtttttcattttgatgaaatccaatatttatttattttacccctttggttgcttgtatttttgttgtcatatctaagaaatcaatgtcaaatcaaagatcactaagatttaaacctatattttcttttgagacttttatagttttagttcttacattgaggtcattgatccacttggagttaattttggtatatggtgtgaggaggggatccaagttcgttctacagcctatatagcctgcagatgagcaatgttagtgaccttgaaagtagaggcccaggttgtcagtagcctggcatctaactaaacaaccatttatccattaaagttagccctgttaacaattaatattgagataattttacttaatacactgtgtatattagtgtccatctagcatgcagcctgaggcacagagaataatagtttgagtataaaattgaattgaatggaatacatcattaatttattatctagctttctgttattgtataggcagtcacatgtatttaccagaaaaaagttgatagaatttttattttaatgaaacccttttatactttagattattttgatgctgattaacaggataagctgactctggacacatcctgacagcctctgccaaggtttgaaataaacagctgggaaaattcagttttatattatctgttcccgcagctgctcagtttcttctaaccacaggtcagggaatataataggttttccgattagttttagataaaatgtgaaagaacagttcatgtcaaggacaatggttgccaaatatatttggcaggatttctatattgaatcccaaaggaaatacacaaacaaaaccccacaaaagttaggaaggagtaaaacccaggaaccctggaacattttgtcatttactatgcagatttgcctgaaagtgagacaggcaaataaatcacatgtttctgccagcgtggaaaatattcactcaaatggcaaaggtctcaggctggggagctggatattgtcctgtaataggttcatctcagaactgaatcacacacttggagggtgttaatgctcttaggaacatctagttattccctttgaatagagtcctgtcctgaatcacatatacttgacctagggcctaggcctttttgtttttctgtctcacaatcttgtttctccatcaattatgtgttttcactcttccctcagagagggaaaaagtgtttctgtgtgctcttgatcctgttccctctctgatcttccaatctattgctctataacatattttatatgtgtcttatatcttcattttagtcagaaacatttatttatttatttatttatttattttttgagacagagtctaactctatcccccaggctggagtgcagtggcatgatctcggctcactgcaacctctgcctcccgtgttcaagcgattctcctgcctcagcctcctgagtagctggcattacaggcatgccccaccacgcccagctaatttttgtatttttagtagacagggtttcttcatgttggcccggctggtgtcgaactcctgacctcaggtgatcctcccgcctcggcctcccaaagtgctgggattacagatgtgagccattgggtctggcctttaatcagaaacatttaaagtgaaagcactgtggtaacttatgttgaaataccttagaaatcaatggaaactgcacagagagggggtaggatagacgtagtggaaccaaggatatgatatggaaaaaggagaaaggtagcaaactagggatgagttggtgaatgtggaagggcataataatgttaaatgactgaaaactacataggcttatgttaagactagtgccatggaaatttttagaggtagatgacattagagtatgtttaaatataaattaatgttcttgcagtgagccgagattgcgccactgcagtccgcagtccggcctgggcgacagagcgagactccgtctcaaaaaaaaaaaaaaaaaaattaatgttactggttgtgttccctagatgtagactctgagatgaagattaacatgcaggaattttatttggagtgttcttgggatcaacacctgaggaatcagggataggcagagggagaagcgcgctgccgggtaggctccaggacagccttgctggatcttacagggagctctggagctggaatgaaccttccaggttggaccaacatgtccaggcctctgtgtccctgcactgagcactcatgaagtgctgtccatcctgggacagggcagagtcggcgctgggaagaggcgtggtctgcccagagagggggtggggcctgtcctggaaatgggcggggcatgccctggtagaggggcgtggtctgtcttgggaaggaaggtgcgtggcccccacaggcaacattcctctggggcaatcccggcgcacacctcagcggaggtgaaggctgacttcccacacccaatggctgggactggggagttctttcctagactgccatccgggcgcccctcaccctcttgctgctcagctccaggtcgtcgtgggttcagggctcagctgcacgctcctgcccgcgccctgggcgtgatggcacccccagcccctgccattcttccccctcaccccctctccctgccactgctctgcattgccctgggttagcctggcggggccaggtggcacccgccgtatactcttgcctttctgctgcaggggcctttctgctgcgggtcccagagctgcagggaggggcggcagagactccccacgtggctcattggcgggggtgctaatcagagttcttttgctgccactctttgattcccaaaccccatgtaatcttcttagtggggacacagaatcatctttgaattcatacatatacagcaccttggaggctggccctccatcctcacagagacctgcctccaagctggagttctacctgtgcctggttgtggacccactccctcatctcttttgctgtacaatgattccccaggtctacacggtgctatatggaattccacatcagtgaatcaaatcctctgtaagatttcagatagtggtgctggctaaggccctgaagggaggaaaggctaagttacgccaagattaggtatcacaatgaagtcctgtcctttctaggatggaaggagttcagtgtgtctggccaccgagaagctggtttgtctctgtgatggacaataccatattgcagcaatccccaacctttttggcaccagggactggtttcgtggaagataatttttccagagactttggggttgttgggaatggttacggcatgaaactgtccgcctcagatcatgcggcattagttaggttctcataaggagcacaaaacctagatcccttgcatatgcagttcacagtagcattcgcactcctatgagaatctaatgcagcagctgatctcacaggaggcagagcccaggcggtaatgcaagtgatggggagccgctgtaaatacagatgaagctttgctccctgcctgctgctcacttcctgctatgtgaccccattcctaacaggccacagaccagtactggtcaggggcccaggggttgggcccaatatggcatattgggagctcagcattgatttttgttgctggcaggttggactttggtggcaacagtagctagatcagccttagtcagtgggaagccacgcttttgggtccatgcattaattctctccctgctgctgtagccacttagctcatgtcttgccagtactgcgatggcctatgcagaggctagctgatgtgaattgccagagtcatttttatatgtgttgttggtttgtgcttccttcaagatggatgctttctgttggcattaacgtattacttggagatttttctagtttgtgtccactcactaatatgcctttgtcccaacttttttctggaagagcttccttatcagtacgctgggccctggccctcagccagtacagaaagtcatttgtcaaggccttcagttggcagacgtgctccctggactacgtgctttctcgggtgtcccagaaaccctggaatggagtgaaatgcagggctacgtgggagagcagggaggcaagaattaagtcggccccacctttgcccaactcagtgggtctccttgagagaggtctgcagtttcaaggagacttttcagccaatctgctgcgagatcctgtgaaggggtgtgaaggtcttcctctgtgactatagattggccagtctctccttgtgtgtccaacagttttcattatactttatgtgaattaatgcaaaactgctaggtttaaactgctcaccattttagggatcccttctggattttaccttccttaaggggaaattttcctcctttcctcagttcatcctttctgccttggctttgacgtggtctggaggccacagagcctcctcctgagaacctctctctggtgtgtctgtttgtgtccgtccctctcctttcgatcattccctgtggttcctgttgggcgcggctcccataaacgcacagagcagggtctgctttgtctgcaacctgatgcattgttatttctcaccaaaacttgcagtccaaacatcacatttccgggccacactctttgtcagagctccaggggcacaaccccggggacctgctggaaggtgccaccgtgacgtgtgcctagatgcgttttccctcagttaccacagcgttcctctggttctggtggctggagggtgaccgcgtgcttcatgaagggggtccttactgcttcgcatccacccttttcacggaaagcactttgtcacatgttttcagtgtttctaagcgattttctgccaatcttgtgtgctaagattgtgtggcagcgtttccacagatttatagctggcaatgaattctcccaaaggaaatcagacaaaataaaatgtttccaacattgttcacatactgacaacttatgtgcttccttgggtgattttacaactttttaagcacatgaataaaaattattgtctgcttttttctccttttttctctcttttttttcttgcatgcagaaagtttataggagggggatcctctggatcaacacccatgggggagtgaaggaagcaggattgggtaaaagaagttgaggtgatacagtctgaataaaggtcagtcccacagggagctcaagctaggatggctctgcagagatgttctctattgaggcaagttgtctggacctatatagtcccacctttaccaggaataaggcatgagtttggatgtggtgactgacttcagccaaaattggttctcagagaggaattcagattagagttgtcagctgtcagcacacccagcagcttaggaaataagtgctttagtcctgaagcggtgaatctggacaccagcctccactgtggtccaccctttctgctgctcagattcatttgcttcataagttctggaatggttccttcaggattctgatgggctccctttcctggggaaacaaaagagaaaggtttggaacacagcacaactcctgctgctttagcttttcttgagtctgcaactggtactcatcatcttccccttctactacccattctagatccctccccccaccaccctctcaattcatacttctgctgctccaagtgggttaccagataaggtatctggtcatcatgccctttgtaagccatgactgtacttgtccatttatcatcaacattgaacaagggaatactaagagatacccaggcagatgacctggctgccaaatatattctcctctgtctccattgtgtaatgtcagcccttcctcctgatgatcaggatcggttacgcttgccaggatagtgactcttttccttacctcttggtctcttaatagtgatctgaagtaatatgatggcaaccatagtttcaagtttaatgagactcttggtgtgtccactggcggacatattccccttttaagaaccagtacttctaaactctcagagcccagagttgggataagaggcatagtttccctaattgggtcactgggagtaatggtagtgtgaggctgctcctacttacactccttgttttccaaaaccatatattttacttcgggacacaccccactaaacgatggccattgatctagagtatatactgcatcctgcaggatggtgcctcgtccttaggtattatgtctaagctagtgcctcagctgtgccttcaacaagctgtcctaccactctatcaagtgggtagcttctgggtagtggattccatggtcatgtatcttcttgctttaaagtaggtctcttggtctgatgcagtgttatgtaagatcaaatattctgtgaggccttgaatggtggtgtttactgaggctcaccaagcaactgaatgattttcttgagaaatggtgacatatcagagccttagctttggtctctgttactggcaagttgaacattaacaacatcagtagctagatctgtattgatgagtccatgatgttgggcccatgcatagcctctgccatggctcctcctttcatacatccattttgtaagaattggggcaccaacagcagagactggtaagcatcaaagtggctaagtcattcagtctacttggttgtttagtgctgtttctgtggctgatgttcttttcatttattcattctgtaatgcgtatcctttgtagattcaatttccttctctctgaacaacttctttggatatttattgaaaggcaggtctactgtcaataaattccttaatttttattgtctgagaaagtttttatttctccttcatttttgaaggatactttcacagagttcagaattttaggttgactgttttttctttctctcaacactttaaatatgtcagtgcactctcttcttgtttgcatggtttctgaggcgaagttggatgtaatttttatctttgctcctctatggataaagtgtttttccccatctggtttcttacaacattttttgtctttgattttctggagtttgaatataatatgcctaggtgtagggtttttttatttgtttgctcgtttgcatctatctttttttttttttttttttttttgagacagaatctcgccctgtcacccaggctggagtgcagtggcgcgaactcggctcactgcaagctccacctcttgggttcacgccattctcctgcctcagcctcctgaatagctgggactacaggcacccgccaccacagctggctaattttttttgtattttttagtaaagatggggtttcaccatgttagccaggatggtctcgatctcctgacctcgtgatctgcccgcctcggcctcccaaagtgctgggattacaggcgtgagccaccgcgcccagctgcatccatcttctttggtattctctgagcttcctgaatctgtggtatggtgtctggtgtctgacattaatttgggggaaattctcagtcattattgctttaaaaatttgctcctattcatttctgcattcttcttctggcatttccattatgtgtatgttacaacttttgtagttgttgttccacagtttttggacattctgggcccatgcatagcctctgccgttgttgttggtgtttttttttttttcagtctttttttctctttgcttttcagttttgattggaagtttctattgtcatgtcctcaagctcagagattctttcctcagccatgtctcatcaaccaatgagcccatcaaagacattcttcatctctgttacagtgttttgatctctagcatttcttttttattctgtcttagaatttccatatttttccttatgatatacatctgtcattgcatgttgtctactttttacattaaagccattagcatattaatcatagtttaaaaaattcctggtctgataattatgacattcctgccatatttgactctgattctgatgcttgcttgttcagtctcttcaaattttgtgggttttgccctttagtgtgccttgtaatttcttgttaaaaggtggacatgatgtactggctatgaggaactacagtaaataggcccatagtgatgtggtgagatggaaagaaagaaaagatgctcaacatcactaatcattagagaaatataaatcaaaactacaaagagatactgcctcacacccattaggatggctactatcaaaactaaaacagaaaataatgaatgttggtgaggatgtggagaaattggaacccttgtgcactattgcaaatgtacaatagggcagtttctctaaaaattaaacagaattaccatatgatccagcaactcgacttctggctatatatgcaaaagaactgaaatggggtcttaaagagatatttatacatcaattgtattagggttctccaatgaaacagatccgtgtgtgtgtgtgtgtgtgtgtgtgtgtgtgtgtaaatatatgccaatggtaaaagtacagggtctgagtcagaaggcagaaccaagaatgcttatgtccaagggcaggagaagacagatgtcccagttcaaacagggagagtgaatttgcccttcctctgtctttttgttctattcaggccctcagtggaatggataatgcccacccacattggtgagagtgatcttctttaccaattcacatgctattctcttctggaaacatcatcacagacatacctagaaatactgttttgccatgtatctgggcatctcttagcccagtcaagttgacatataaaattaaccatcatatccatgtttataagcagcattattcacaatagctaaaatgtggaagtactgcaagtgtctattgacagatgaatggataatctaaatgtggtatatacacacaaagcattacgaaagaaggaaattctgacacatgctacgacatagatgaaccttgagtatattacgctaagtgaaataagccagtcatgaaaagacaaatgctgtatgattccacttatattgggtacttagagtagtcaaaatgatacagaaagtagaatggtggatgccagagactggaggaggtgagagttattgtttaatgtttatacagtttcagtttacaacataaaattaattctggaggtagatgggagcatattacacgttttctttttggagatgggatctcactctgttgcccaggctggagtgcagttttgtgatcatagctcactgcagccttaactgtctgggctcaagtgatcctcccaccccaggcaccaaagcagctaagaccacaggtgcacaccaccacgcctggctaattattattatttgtagaggccaggtactgctgtgttgcccaggctggtgttgaacccctgggctcaagtgatcatcctgccctggcctcccaaagtactgggattacaggtgtgtgccaccacacctggccagaatatttaatgctactgaactgtatatttaaacatgcttgggctgggcatggtgcctcatgcctataatcccagcactttgggaagccaaggagggtggattgcttgagcccaggagtgtgacaccagcctgggcaacatggtgaaaccctgtctctacaaaaacattaaccgggcatggtggcacacgcctgtagtcccacctactctggcggctgaggcgggaggatcactcgaacccgggaggtggatctcgccactgcactccagcctgagcaacagagtgagaccctgtcaaaaaaaaaaaaaaaaaaaaaagatttacgatagtaaattttatgtgtattttaccacaattattaaaattgaagaaaatccccatgggtcactggtttaccaatttagccattttcaccatttttagattgcattttccttctctatctcagcattctgactaaaggaaaagcaaaatttcttacaagaatgaatgattctccagtgtggctgctcctgaaaggaacaatgagacttttgttatttcaccacaagactgagaaagaaataaacaagtgataaatgcccagaccccttcttattcattccacatcctggtaatctgaggcatggtgtggcttttactccaagcatatgaatacttacaatcagaagctgcctctcctttccctcactttatcattattgccatcatttatgacaatggagggagtgtctcactggatgatatttggggttctttcttcagtggtccgccataccaagcatttatttgtgctgttctccatctttcacatctaccacttttcaaaagtccctgagagtcaataagacatgcgactcgaacaactgcttcacatctaagtgtatgtctttaaaaatctctccttttccatgtttatgtctgatgtgttttgttatggcaaagtggcatgtagtatacggttcataagtgaatcgatgtatatctgtggagggcaaatgctcaattttagatctacacatgaaagcttttttccagggcaggagccttgctttctccaactaagccttaattacccaaatgcccatgtgttgtgcctttggcttgttgaaatgataccaactggtaaaatctgatgggagataaaagttagatgtccagaagcataaaagtcaggaagagaggctctttatggcatagagaaagctgcagaactgctccatggtgtgcaaaactcatcagcacatgaaactagtgagtggagatagtcaccttcaaccactttgtaatttctaccaattcacttggggccagtgtcccttattcaccaagattcacattggtccttttgattatttggcgtgaggaggcccccagacatgctaaactgtcatgcagggagagaggaaaagttgggaaccagcctttgcttaaaagggctttgacaatggaggcaaataataacattttgggaacatttatataagtaattatataatttctgattcagtagctggttcatgaataaatgagtaattgggagtatctgagtggagacaagaatgaacattaatgtaggactgattctgaattacagcttctggcactagtaggtttcaatatacatagtctgctgaaaggtaattttctctgtgatattcctggtatccctaaggagggaagtataattttaggtacatactgacaaaatttgaacacaaggtacttagatgaaagttatagtctgttttagagatgaaattgaaggatgcagtagctattgctttggcaaaggatttttggctgatgcagtgtatggttattgattttatgattcttatcatatggcacctaatgtatcagttgagttgtgaaaacagtgtttcggtttaatggatgttagggatttatatacaacttcaaatttgcctccttgctaatagtagaaaagagtagtatggaagcattacttccagctgctttttgaagtgtccaccaaaatgaacgactttttcctttcttcacgcagatttcctcctagagtgccaaaatcttttccattcaacacctcagtcgtgtacaaaaagactctgtttgtagaattcacggatcaccttttcaacatcgctaagccaaggccaccctggatgggtaatgaaaacaatgttgaatgctatttatgaaattgggtatcttattttctatcacagattccccaatcttgaggttgcagttaaaaagtgcagctgccaaagagaatgtttccctaactgctacctatagggaaatacactgactgcattttctgtctttttgctgggccgtcttcctctgcttggtctatgccaactgcttacctccacttagatgtcaaataaagtatgtaacaacatgttatgacaggacattttctgtcttagaattgttgctgagaattataggtgggaagtatccccttattctaaagagagatatcagcctatcgatttagaacttgttcaggtagtagtccaaaattggttctgcaacccttaggccctgactcacctccaaccttgtataaaaaaaggctaggaacttatggaagactttagatttgaatatttattatttggagagcctcttcggtgttttatgtgttgcttaccccatggggagtgggaggcctgtccctcatgtcaaggtataatgaaggaggcttcaggagaaccacttagaagactggacaaggtacctatggaacttgggagacactgaccactgcctggtttttatctggataaattttcaaggtcagaggccaaaaggacttctcctgatggaatagcagggggagtgggcaatagtgggagctaactgcactaccattgttaggtgtaaggccaggaaggtcactgaatgggacttgtcttacaaagactctgcctgagaggtcttcctgccaggattagataaccccaatagaaaaagcctgtatgggttgtactgccagaagcagaatctgagaggagagatacaagtgaccagctggagaaggtatatcccatgccaagatcaggagcagtggggtgtctccttgttggcagggagaggtctccaaataactcataagttccctaagaaagaaaggcagaattttggtatgtgtcacaactagggagtactaatgccacattatcactgctccttccaagaaagactttgtcattgtgcctatttgtttttaccctcccccctcctttccacttgctcctaccttggcaggtccagagacacaaaggtgagttggggaggaagattaggagaggaaggtgggaaagcagcgaagctgccaaaacaaattacctttacatattgcagatttctggggctgtcagaatgtagctggagaaggaagggaacttgcaattgcagaagacatcaaaaatttggtattagactggactggacttgttagaacctaagagtgatactgttggttaatacctgaaggttactggaaaagatttgggatcaaccaaagtgcaagaaaagggagatctcacataaagtaattaaaagcagtggtctaagaaaaataaggctattttatgtttttatcccactcaatccagttcattcaacagactgtttataggcattttatacttagtgtattcataaaacagagctcttaattttcctcctgattttctgtcatggcctgactaacaacccagttgcacaagccaaaatcataggagttttctttgactcctctctttttttctatctccacatcatatttatgagcaagtcctgttgactgttcctccaaaacaagttccaagtcttcttattttacttcttgtaaaatccaaattcatccaaattcctgtggcctgcaaggtcctacatgttatgtttcctttttgaccatattttctgttactcctctgctgattcactgtgcttcagccacactttacttgactataccaaacttatttctgcctctggacgtttgcatttgttttatctgttttcaatgctcttccactagatctttgaaaatcttgcttctttttcattagtcagatctctactcaaatgtcacctcctcagagaggcccttcctgactactacactgaaagtatcctctacctcctgcctcatcactttctagcagaccactatcttttatatttataacaacttgaaattttcttatttatttctttatgtgcttaatgtcttgagaatatgatctccattatctgtcttgtttgctactgcacctccagtgcataagacagttcctagaatatagtaggaactctagttgaatgaatgaatgaattgaatgattgccagaaatcttgcctcagagcaaccataaggttaggctgatgttggcagcaagcaaatactactttttgtcagtaattacaggggcatgcttctccactgtgaccttgactctaacttttggaataacaggttttctggagtactatccccaagtaacctttggcggacatctcattcttacaggtctgctaggtcctaccatccaggctgaggtttatgatacagtggtcattacacttaagaacatggcttcccatcctgtcagtcttcatgctgttggtgtatcctactggaaagcttctgagggtgagtaaaataccctcctattgtcctgtcattctatgaatagaacagtgagatgtgtgtgctttgtaatggtggcgttacaactcttttaaggtcctaactgaacattatgtgtatttcttaacatttactagattataaatatctcaagatagggaaatccatcttatttattgctgtgtccttagcatataacatattgcctaccctatagtagatactcaatacaagaatgagggtgtagtggacaccagtcattttttcttcctaaaattaaacatttctcacctgtataccccctaggaattgcttttctgaatatacttcaaacagaacctgccattttcttaaagcccatgcctccctagccatagcagttgatctaggagtgagcagttgacacgggtatcccacctccttggccacagttgattggtccagagatgggcaccttacccaagctaggccaatgagagtacttgcactagcattttgaaatttatgagaaaaaggacctattattaccaggtaatcctatacttaggggatggagcccaaatataataaaatcaagattctactacttcatgtatatcatgtgggccatggatcttataggagtcttaagggggtgttggtcttgtccttttcttagttgcctagctctttgcaggcatggtgcaaaggcaggacaatctacctttatctgctccttctataccactgatcctaccctaaacatgtagctgtataatcagagacaggaagccatggcaaatctggagggtctcggcttggctatatcttaaagagttacatgtattcgtagttcaacattggggaaattttccaaaaattggtggagaaacgagtggccaatgcaattttatctttttttttctgctgacatcagggagagataagagctttaaaatcacaattatggggagataatattttaaaatccagctcaagttaaacccatcagaaaaggtaacaccttttgggacccccaaatggccacatcttatccaatgaggggacaccaaccatagagtctatactgcacagttcaaatggtagccatgagctatcaggcacttgaaatgtggtgagtcctacttgagacatactgtaaaatatacaccagatttcaaaggttaagtacaaaaaagactaaaaatatctcattcattgtttataagtacaagttgaaatgcttatatttggatatactaggttaaacgaaatacattattaaaataatttcacctgtttctttttacttttcttaatgtgactaccagaaaatttaaaattacatatgtggtttgcattatatttctattgaacagtgaaatgtttagcatatgttgaagttgctgctcctgatgcagtggctcatctcagatttggccaagttcttctgtccaaggaaaactaggttcaacccattcctggagaggaacagactcaaatctttctgggctgggtcacttaccttggttaaatctgttctccacctattctaccaacaaccaaagggatggacatagctgaaataaaaatcacgcaatcacactgaatggtatctcacctcaggtgggccttcagcattgcctagccattctactgctacatttcccctaatccatttactctccctctccccaagacagctataatgtttcacacattgttagcctctcattgaacctccaacatgtgctcccgcccctgcccccaccacaacgtgagccttgggaaaaagggtatttttttcctaatgaaatatttcaaacaaagataaatacagaaaataatataacaaacaaacatgtgcccatcacctcactttgccaaatcttaacattttgtcatctttgcttaatttattttacaaaattaagcattttacatacagtctgtactcctctatggggctggcaggaaaaggctctcattgtcaaagttcaaagtaattgatcattgaaaaaataatgatcacattaaaaacaacacttatataatagagatacatattgtaatactcataaatgaaatgatatcctgtctaggattggcttcaaacacatccaagctgatgttacaatcattaggtgaattcctgatgtggaatttgacatttgtatggcgccaaaataatatcccagtgatttttttctgattgtaagtggaaatgttaactttagaatggaggtatcaggctaatccacaggtcagttttagtgtcactaaggatgggatggccagatattatctgcccctgatatggcacaatatgagggactcagcatcatctttgatatattttagccaaaaaacttatttaatttgaatctaatcagaacttaggcatattcaatagcatgggatattctacaggactacaagccaaatttctttcaccaaatgagtgtcagaaaaaaagggactactccatactaaaagagactatgggcctaaacaaccagatgcaatctgcagtcttaggttggattctgatttggaccaactagctacaaaggatgcctttgaggcaattaagaaaatttgaatattgcattgatattaggtgatattaactggatcaggtgtgctagtgtcattttgtttatgtgggcaatttttttttaaagatgacttctaaagtatataggagtggactatcatgaaatttgtaatgtacattaaaatgcatcatcataaaaagtgtgttgaaagaaaaaagtgaaagtagcagtgcaattctaagaataattttctaacatccactcacaaaaatattaaattctttatattaaacacatgaaaaagaacacaaatatatctgtctttcaagattcatctcaaattccacctccttcatcaagcattactgaagagtaggaagcttgtttactttttttatccactgtgttgctcgctccaagggcatagagacttctatcttgatctttatattttcagcttgtagctgagtctggtaaagaataagaactcaataaatatttgtgaataaataggtgaatatttccacatggtattataattatatctttatatgtctatgtcccccaccaaacatagtgttgtaccactaggaaagaacaaagtttaagaaattttcttaaatctctctttcttactgttccgtgaccctcactagtgcctaccaaagagtctgtgacaaagtgtatttgttgttgaattgaattaggcaaaaagatgcaataatggaagcaatttattatttaacagaatgtggagatatcaaccagaacctagtttttactgctcatgctagggttagtgatctcaagatcctctggagtatatgaagcttctccccatttgtggctgctgcttgttagtttttcaaattaagatgcagaaagtaggccgggtgtggtggttcgcgcctgtaatcccagcactttgggaggctgaggcgggtggatcacaaggtcaggagtttaagaccatcctgaccaacatgatgaaaccccatctctactaaaaatacaaaattagccgggcatggtggcacgtgcctgtaatcccagctgctggggagtctgaggcaggaaaatcacttgaacctgggaggcggacgttgctgtgagccgagatccagcctgggcaacagagtgagactccgtctcaaaacaacaacaacaacaacaacaaagatgcagaaagtccgtttcttatgtagaacctattggtgacaataaacttgacatgtttctttgagtgtacagtggatatagaaaggacaattttatttcttcctgctataggagctgaatatgatgatcagaccagtcaaagggagaaagaagatgataaagtcttccctggtggaagccatacatatgtctggcaggtcctgaaagagaatggtccaatggcctctgacccactgtgccttacctactcatatctttctcatgtggacctggtaaaagacttgaattcaggcctcattggagccctactagtatgtagagaaggtaagtgtatgaaagcgtaggattgagatgaaataagcagagaagtacaaacaactgaatctatctataacagttagcatttgtgttccttcacctgaaagaggcttttttactctagcatcatgctcatggaaaggagaataatccagtttctgagagaagcagatatgcattctatataaccacaataaactctaagctgggatcaggaggagctgagttccagaattaaatctctctcctcaaagcattgctattttcctcttcaaatctgtgggctttatcagtagtgatttctactgtcctctgccttttgcaaactttgagctaggttccttgaaaacttcatggaggtaaacacatccaagtgtgtgatcaatggcatatagactggttcaggtggttagtttgtcatctgtaaaccaaaagtatataaaaatctaagaaaagtcagcatttatttatatgttactgaaaattaattaatttggattgaattaatatattctaaaataattctaatcaaacctgtttttaatttataccttagcataaattagggaagtaaattttgcataatttgtttttatcctattttttatggtgaaatcagcttcactgtaccttttccttgttccatttatcttttactgcataactccacaatttagtggcttaaaacaacaacagtctcttattatctctcatggtttctgtgagtctcatggaatttgtcagtgttttgacttggtggcctatctaagtgtgtctcatgaggctgtagtcaaacagtggctagagctgaaatcatcccaaaggtgactttattcacatgtctttgaccttggcttgatggtactctccacatgatctctctcacatgggttttacagggtagccagacttcttatatggtcctgagatagcccattagaagctgtttcacgatttctaatgtaaccttggaaatcactcacataacctacattctattagttagaatgcatcactaagaccagtctataaagggagactccaccttttgatggggaataggcaaagaatttattaacaggaatcaccatactctttctgaatggtgatgatgaatgtgattcaaaaaaaggatgggagcggggagtggagaagatgagaaaggtttgtagtttataatagtttcagatgaaagtatgatttctcatatactgagttcagtttcatagtcataattaatgagaaagtgccaaaaccacagtgtattatttatgggatgtaaaggctaatggaacaatgagatcatcaaaacattagtgtttacatatgacatataaagaaataagttaaaaacccaaatgattctttgacacagagttgaactaaagagtctacagaggttctagttccaggtgaaatggataaacacactccaccctttatttcccattgaacttaactataaaaccttgacaaaatgcaaagcccagatatttaaaaatttctaaaaagcaaatagaacaagtatatagagaaaagacactagaattgaaagtattaccaaacttgtgggggagtatacctttttccccactctagtattccttaacctgaattaaaacataactggagacttcgaagtgagtactatgttgcaaagagagctccaggacaaaccctctggggtttcaaggagtgagaaaggtaactctaaatgctcagagagcgtgggaggggaaatcccctagggtttttgtcctcttttccaccattctctcaagcttcagtcccaggttgcctgtggcaatgacagtggctggcaacagaaacctgccggagtaaaaacttagggaggggaacattattcttcattcagtacagctacagatctaagacattgggggaaaagcacattactttctctctgtctttccccttccattgcttgaccttagctatgatgtagttgtggaaattggaagcttctggttagaaaaccaaaaaagggagctcacagaactggaaagtttatagatgacagagagaaaagatcccaggaaagtaaacccataaagttgtgcattaactcctggattcacccccaacctacacatccaggtatgtagtttcagtgtcagatctgttttaaaccccttgcagtgccattgagtccaacgcagtggccagtctggtgcttgaggggaaatctcagtttcacagtcttcaacatgttccattagcctttacgtcccataaataacacactgtggttttggcactttctcattaattatgactatgaaactgaactcagtatatgagaaatcatactttcatctgaaactaacgcccacagaattccttaaaacatgtctgatggctgaaagcaaagatagaacattgtgagataggttttttaatgtatggtagatacaatacataaaagaatcatagcataacaagaggagggtaaggaaaactttatggtccattcaacttcattccaattcaaatggtaaaatgttgactctaagtagatgatagtgaaaggttaagtatgtattttgtaatccctagagcaaccaataaaaaattataccaagagacacagtaaaaagtcacaataaactaattacaatggtatatcaaaaatattcaaataactcaaaagaaggcaagtaaggagagatgaaaatcagagagaagaagcagtaaaatcataataaaatgataggcttaaatctaaacatatcaatacttacattaagtgcaaatggctaaaacacaccaattaaaaacagagattagcatactggatataaaagcttgaaccaattatatgttgtttacaagaaactcatttcaaaaaaatgatataggtaggttaccagcataaagatggaaaaggatatatgatgcaaacatgaatatgaagaaagttgaagtagtacaaatctgtaatcacaacattgatttttgccaggagtgccaaaaccattcaataggggaaagaatagtgtcttcaataaacagtgctgaaacaggtgaatatctgcatgcaaaatactgattgagtatcccttacctgaaatgcttggaaccaagaacgtttcagatttcagatactggaatatttgcacatatataatgagatagcttggggatggaacttaagtctgaatatgaaattcattttggatataaatcccttgccagttatgtgattggcaaatattttctcccactctatagtttgttttttcattcttttaatggtgtcttttataaagcaagagttatatggacaaacatatgaaaagatgttcaacatcattaaccattagggaaatgcaaattcaatcaacagtgatgtatctattagaatagctaaaataataatataaaattgccaagaatcctgtcaagaattcagagcaacagaaagtttcacaatgcacaatggtatagccattctggaaaacagaatggcagttttgctgcttggtagagaaacagtctctggcagtttcttgtgaaattagatgtacactatagagggatagcaggagggagttctttttggatattgaaatggatctgtatcttgacgatgatggggtttcatgagcttatatctttgttaaaagttatagacctatacaccaaaagaaaaagtcaatttcactataattgaaaatttatataaaagtaattagaatgttttaagacagctttatacgtattttaaatgtgtctctaaagtttttaatccagtacttctggtaaagatggcacagggtcttcctacttagccatttttccatcctccacctcaaccccaacctcgctgaaaaccaacaacaaagataggtaaaccataaatagagaaaatcgaataggcatggtcagctgaaaaagaagataaatatttgtggaccagaagcagaacaggaactgtgagtagtaaaaggggtggaaattacaggccaactgagatctgggtcaggaagccagctgcggtagccaaggagtcaggatgacaaggataaatagtgctccccaccagagggactgagagcccatatcatagagttgggctcttcttcacttgaaagagagctgagcacagctgctgctcactctttgtttagggccatggctttgtggaaactcagagtcctagaagaggggaaagcaaacccagtcctagaataggaactgaactaagttttcttggttcagtgggggaatctgcaatatccccaaggtttccattggccagtatctccaaaattccattctagggtatgatttgctagatagagaatagtgaacacatcctttgcttaatcaaccaatgatcacaagggacagcaaagatcactatagttcaacaaagtcagatttattggctcatggcaacaagagactgtggacacctccctaaacaaagggaaatactgtatagagttagtaaagaattttggggaagggtggaggttaggtgatatttaaatgaagcaaagtagagttgtgtgtaaagaaataaccatgaggtctagactgtgaagtgttctaaaaagttaacatagacatgaaaggttaagtcaaggcaccccttacctgaagcttgagctttaaattgagctgcttctttgtgtcaaagtaatttagatgacctaggaaagaatgagatgtttcattcttgttgctattagttcaaacatttctggcaggctgtgaattcagagaacaaacaactcaattgagtaagaaagcaagagataatcaaagcaaatagttggcattcagtgagtttatacagtggcaatgtgtccttgggagaaatggtgttgttaactctgcagttagctttatctatgtctcttatcccagcctgatgagtagcagcacacgtactgttgctttcttagtccaagctaatttttatttctaagcattaagggtgcgagagagagaaagaacggcaaaatgtcataaacaaaaatctttctactcaaaataagcctgtaaacaaaagtttccagtcaaatttaaaaaatatataattctaagaaagatagccaacaagctcaacagttaaagcatgaaacaagctagtttgttccattaaaaacttcagctatcgatatacacggtatttatttaaaatgtgagtataattagaagcactgtgggctattgaaaaaaaatcatgagtatagatgtttaatatggacaattgctattttactcaaaacttttaatttacaattgcagaagtataaaaagttacaagagtaacagaaattatctataatttcactattatcacacagtgtgtgagggcttgtattttgtaagtgtttttaatttttttctttagtaattcatttttatcatattttacacaagtagtggtcttcatcaaagttgaaataaaaaaattctttgctccagatagttttagaaacactgctataggagacctgacatcaaagccaagttatcaagagacagaagactacatttgttcttactgtcaagtaactgatgaagaactgtctcctcctagtgacaatttcctacaatgagattttttaaatagaagataaatgttctcacttctttttcagggagtctggccaaggaaaagacacagaccttgcacaaatttatactactttttgctgtatttgatgaaggttagtgagtcttaatctgaattttggattcctgaaagaaatcctctgctactattaagaggaggtgattatagaaagatcataaattacattactgttcaggaatgaaggagatggggttaaaaatgaattccaagaaaacaaaacgtaacctcagttccactggcagctatgaggtaagaagatagaggagctggataacggactggcctcatccccctcattaagactgtcaacaaatactttgggctctactttctaaatactttctcttatcttcatctattattaagtgcacaacctttggcaagttatttaacctctctgtgtctcggtttcctaaatggaaataatagtacatttttcataagattgttgtgagtgctgagtgatttcacttaagtaacctagagcactgtgtggcatagagtaggccctcaatagtgttagtacctccgcctcttcctcctcctcctaatgtaatcactatgtaatcatagtaacataatattcttcttgcccccttatcaatttacattgccatcttcttaattgaggccctcatgatctgtctcataactctcaaaggaagcttactgaagtgagtatctgatcttgtcactctagcctctacaatacttcagtttgccagtttcggtggctcatgcctgtaatcccagcactttaggaggctgaggtgggcagattgcttgagcccaggagtttgagaccagcctgggcaacagggcgaaaccacatctctacaaaagaattaaaaaatcagccggtcatggtggcgggtacctgtactccagctacttgggaggctgaggtgggaggatcacttgagcccaggaggtgaaggttgcagtgagctgtgattgcgccactgcactccagcctgggtgataaagccagaccctatctcaaacaacaaaacaaataaaataattcaatttcaaggtaaagtgcaaaatgcattatctattctctggtgacatttccagccttgttgtgttccatttcctgccttatcttccatgtcacccaaatatgtaatgctttttcttgcatgagacctctgcatatgcagtttcctctgcctggaaaaatctgtctccctctttacactaagtaagcttctcctttttctttaagtctgacttacttcagttatccccttccttaattccttctcccaggatgacctctagtctggattagatgcctgcttatatttccacagcatcttgagcttattccttatcatactatatcagtattttctactttatttaatatttatcttctttgatctcatatctttttcccttcaagcaaagtgaaatttcttctcctctctgctccctgtaacaccctactctcatctttattatatcactctttactctttattataattatcagcttctctgacgattccagctagagtgtaagcatcttgaaagcagaggctgtatcttcctctctatcatcagtgtctacaattagtagtgctcaataaatatgtgtttgaatgaatgaacaaatgaatggctgcctcataaagttttagcactagctaccagtccttcacacaaaggggtaactccagggagtcactgttcaatagtatttccagtgcttcagcccttatcaatttcagagacagtgttagggagctttcaggttcctggggtttcataaatataagctgggatgaagcaattataacggagacagggactgacagacagcctttttcctaggacaattttcttttttcttttcttttttttttgagatcgagtctcactctgttgcccaggttggagtgcagtggcacaatcttggctcactgcaacgtccacctcccaggttcaagtgattctcctgcctcagcctcctgagtagctgagattacaggcacatgccaccatgcccgcctaatttgtgtatttttagtggggatagggtttcaccatgttggccaggctactctcaaacgcctgacctgaagtgatccacctgcctcagcctcccagagtgctacgattacaggtgtgagccaccgcgcccggcccctaggatgattttcataagctttcttttaaataattcagctaataaaaagaattgaatcctgatgcctcaagctaaccaatattctgtcttctattattatccattcccacttattgtcatggacaaatggagggagagaaaatcagtttgagcaagagatgtctgcctttacataattatcttctccctccctcacactgactttgagaggataagtgctgtgtgcctactttgctgacaaaaatgcttaaggtgtgagcacactgggagcagggaaggagaaaggggaggcggtcattcatgagacacatgcttagctgactctatctttgccttctctctcatcagggaaaagttggcactcagaaacaaagaactccttgatgcaggatagggatgctgcatctgctcgggcctggcctaaaatgcacacagtcaatggttatgtaaacaggtctctgccaggtatgtacacacctgctcaacaatcctcagggtcttccaaattcagcaccagagttctgtacttcagttcacaaacagctcggcatctcagaggatatagcccactgaatacttgaagatctctggcctctggggatcttaatgtatagtaggcaattcctcttttggtcacctgaaaatgaaggcttacccatgtacatacagcccacagtcagatttttctttccttttcttaaatgtgagtgggcaaccaaggatgaacagacatttaaaaagaacctaaaatatggaagggatatgcaaagatgaacaaagaaaataataatcccagaataaaaaaagctatggctcagaacagaactcatcggaagctcttacttctattttcataaagattcaagaagatactgcatcaataaagtaacaataagatgccttccagttttaaaataggggcatagaggcaggctggctttactccctctcacagaaaaccaaaaccaaacatacagcaccaatatctacaccaacaacaacccagagctcacatgtgaggatgagacagttcccggagccacagagaagtgaaaaaactttgagaatcagacttccacatccatgactctccttcctcctattctgcccagcaccaagtgtatggaaaatctcccctcaactcatggtttctacactggaaaaagtgacattgaggtgttcaaccagcttctccaccttcttgggttccctggggggagatttgtccttgccttaacccacagaaaacatcatgactgtctgaaggcagaaatatcccagagtacaggcagagacaaatgagggaggaaggactaccatccccagccctggaaattctgctctataatttggccaaagacatgcaaattcagaatggccgtgcagcagcaccatgctgtagcaggtttatcctacaggtcaccttggcatgaatcactagctggccttccaacactgctatgataatccctttgggacctcacccacttgggacaggcagggctctgaccacttactggaacacctgtaatcccagcacttgagctcagcacaataacaataggagatggctactaccgttaattttatgcagttacgatttaatactggatctttacgtttgtttacatttgtcccaactggcaccttcatcacctccaccctccccaccccagactatggtaaccacgattctactctctattttcacaagatccactcttttagctcccacatgtgagtgagaacatgtggtattgccctgcagtgtcacctatgttgatgcaaatgaaaatattcttttttatggccaaatagtattccattatgtatatataccactgaactgtacacttaaaaatggtaatgatggcaaattacatatgtatattttacatcaataaaaagaaacttaaaaataaggtaacaataggattctatgaaaaacaatcataacaaaacgtgctcataaaaattataaacacaatggtcaaaatagaaactcaatagaaagtactaagaatagataaaatctttcataaggtcaaacaaaatgtggttgagaatatagttgacccttgaacaatgtgggggttggggtactaaccccctgcacagtcaaaaatccatgtataacttttgactccctccaaattcaagtactaatgacctattgttgatcagaagccttatcaataacataaacaacaaatattttgtgtatgtattatatgctgtatattttcaataaagtaagctagagaaaggaaaatgttatttatacttttctctgcttcttgggagtacttccagcatcactagtggcactttatacgggtcccaagtatccttcaaagtttatggagagatgaaatgcttatgcagagatgattagcatcatgcagagttttcagtggatgcctgcagcactcgagctcagcacaataacaataggagatggctactaccgttaattttatgcagttgcgatttaatactggatctttacgtttgtttacatttgtcccaactgggaatggtgccatgtatggttgtaagtatgtaagtttttataaatttcaactttttataatagatttttgtatattttatggtaataaatgataaaatagtctagtatcaacatgtatatgtatatataagtgtgtatacatatatatatatattttttttttttttttttttgagacggagtcttgctgtcgcccaggctggagtgcagtggcgcaatctcagctcactgcaggctctgccccccggggttcacgccattctcctgcctcagcctcccgagtagctgggactacaggcgcccgccacctcgactggctaattttttgtatttttagtagagacggggtttcattgtgttagccaggatggtctcgatctcctgacctcgtgatccacccgccttggcctcccaaagtatatatatatattttttgagacggagtcttgttctgtcacccaggctggagtgcagtggcacaatctgagctcactgcaacttccccctcttgggttcaagcgattctcctgccccagcctcccaagtagctgggattacaggcatgtgccaccacgcccacctaatttttgtagttttagtagagatggggtttcaccatgtttgccaggccggtcttgaactcctgacctcgtgatctgcccgccttggcctcccaaagtgctgggattataagtgtgagccactgcatccggccatctccatatattttttgcattcataacatacctttttcttaatttttttgatatttttaccctatgtggtccatctgacagttttttcaaattgtcataaatttccaaaaaaatctcactatatttattgaaaaaaaactgcatataagtggactcatgcagttcaaacctgtattgttcaagagtcaactgtgtgttttaaagcagattttaacatcaagaaatgatagaaaaatgataagaattaaaagagataaatattcatattagaattgcccatcaggagcttctgagtagctgaacgcatggaggttcctggagagtggctggccccatgccccttcccacatacccttccttatatatgcatctcttccatctggcgtttataagaaaaggtgctgactgctgaattataaggacactgtggtctactagataaaggttgaggagaggggtttgggcttctattgtcttctttccgggccttcatctcctgcttgtgattaagtagtgcatgctgagtggagcaaagtggtggaataggactcttcagcaataatctcctcacagaaacatcaaggtaacaactcgatgcgtgaaattaccttcagaagagttaagaaaacctgaacccatgagcaagactgtgaagcccttttggactgcaaagacgagtaaaaccatagttgcacataaaggggattggttctttatgactgagaccccacccgcaagccactgcagtaccacaggcggaaagtcaccatggacccacggtttttacaccggaaaactctcccgtatggcctgagtgccctctgtggatctccactaattagtagcagagccagcatgagacttgcgtctaacctgggctcagggcgccctctcgtgctaaaaggaaatacaacagccagtcctttcactttctttttgatatggtctctgttgcctaggttggagtgcagtggtgcgatcatagattactgcagtcttgaactcctggctgggctcacacggtcttcccacctcagcctccagagtgggactacaggtgtgtgccactatgcctggctaaattttcgggttttgtgtgtggggtggggaagattggggtattgctatgttgctcaggctgggtctcgaactcctgacctaaagcaatcctccagcctcagcctcctaaagtgctaggttacaagtatgagccaccacactcagccccactcaatttctaaacgagctcactgaaatagagcagtcacaaacaaacccagactgtgaacatgagaataaatacctaattcttcaatgtgtagacagggatgcacatctgcaaagaataagaatagcctaagaaagacagcctcaacaaatgaacaaaaaatcgtgccagtgactaatcctaaagacatgcaggtgaatgatctggtagacaaagaattcaaaatagctattttaagaaaactcaacaaacttttataaaacacagagaaacaattcagaagtttatcaaagaaatttaacagagaaattgaaggaataaaaaaagtcagaaatcctggaactgaaaagtataataaaaaatgacacatgcaatacaagacatcagcaacagaattgatcaggcagaagaaaggatcagcaagctcaaagacaggttatccaaaaatacaatcaggaggggcttcaggatggttgactagatgcatctagtgttcatcccttccatggagaggaaccaaagtagcaagtagataattatactttgaataggtcatctaagagagaacactggaattcaacagagcagtgacaggaagcattgaaagcaagggaggagagagaaataaggcctgtttgcctgggattggctgggagtctggaacagcttcctaatgtggggaaaaggtaagagacccttagtgttcctcattttcaccaaggactcttgcaatcctagccacaggagagcgccttattccttgacagcacagagactagcatagggagttgcctaaagaccgtgtgaaggcattgcaacagagagctcacgctggattctgcaattctcccaagcagctgcagcacagcaccattttgagaacacagcccacacatcctgccctgctatgatggccgtgacttaggcaggagccctgagcagtgatcctgccccacccagcagaggagtgcccatgcattttcacatattccaagaacaaattccactacctacaaccactgctgctgcaggctgctgtggggccaaaacactagtgaaccttgtgctcccaagctacctgcctacagctactccctgagaaagcaaccccaccttcaccaagagcagggctatagcacagctactgctgcaccccaacctgagcattttgctagtgacctcggtatcaccccacccctgcatagcacaaccagcacctcacacaccaccaaggagcctgagggcaggttcacgtagcccagctctacctgcccccagtacccaagcatatcatccaggggcctagggatcacttagccctgtccaccactggtggcacctgagcacctcctggggtctgaggtcaggcccactcaacctgccactactgccacagttagcactcactgcatgcaccacttgagggtctggagactggccatgcgatccatagcagccacaaccaacgccagcacagaccacttgagattcaggttgtttcattgctatgattgccatcaaccatgccactttgctgcccaggaacttgagaacccacccacccatgtgatccatcaataccacttctggcacccaagtaaaccacttggaggcccacaaatcaacctgcctggacctaaaaccagtgcaatcatatgccaccatggtacaccaaagacaagcacactcagcccactgctgccaccattggggcctgaagacaggcctacctggcatcccacttctcagaaaaacttcaccacagcctccactaataaccacaccctaagccactgagaaaatcacaaatatcactgatgctgtttagaatcttatacagaggctactacattcaccgagaatcaaaaccgaagtgctctacccaagcaacaccacagatacatcttcaggaaaaagttctttcctacaaaagcaaattttaaaaattggaaaaagtgattattacaccagatgtgcagatatcaatgtaaggacacaggaaacatgaaaaatcaaggaactatgacactccaaaggagcacaataattctgtagcaagagatccaaataaaaaaaatttaagatgggtacaaaaaaatagaaagaatgaataagacctgctatttgatagcacaacatggtgactatagttaataataacttaattgtacattctaaaataaagagtgtaattggattgttaataactcaaaggataagtgcttgagggtatacatacctcattctccatgatgtgtttgtttcacatcacatgcctgtatcaaaacatctcatgtgttccataaatatatacacctactatgtatccacaaaataaaaaaatcatagtttacaagcaaaacagtatatgtgaccattggtttttaagtaaactggccaacatctctttaaaaatttatgaaatcctggaaaaataattccaaattttgatactaaataaactcagtgagatacaagagaattctgaaaaaaatacaaagaacacagaaaaacaattgaggctatgaaagagaaatttacccaagagatagatatcaaaaaagaaccaaacaaaaattctggaaccaaagaattcattgaatgaaatacaaaatagatttgaaaggttcaacaatagaccggaccaagcagaagagtatcagaactgaaatacagatcttttgaaataacccaatcagacaaaaataaagaaaaaagaattttaaaaaatgagcaaagatttcatgacatattaggcactataaagtgaccaaatatttgaatcttcagtgtcccagaaggcaaagagaaaatgaagaggttagaaagcctatttaatgaaatattagatgaaaaatttccaagtctaccaagagatttagacatctagataaagaaggctcaaaaatacccaaataaatacaatgcaaaaaggtcttctccagggcacattatagtcaaactatcaaaagtcaaagaaaaaaatttaaaaatagcaagagaaaagcatatagtcacctgtaaaggagccgctatcagactaactgtgaatttctcagcagaaactttacaagccaggagagaatgagagagagagaaaaaaaaaaaaaaacacctgccagccaaggatactgtacacagcaaaattatccttcataaatgaaagagagagaaaaatattttcagacaaaaaaaaactgaggaaattcattgcaacctgatctgctttacaggaaatgctaaagggagtttttcaaactgaaagaaaaaggtcctaatgtgtaacatgaaaacatctgaaggtataaaacccacaggtaaaagtaagtatcccgacaaattcagaattctctaacatggtaattgtagaacataaatcacttatatccttagtaggaagattaaaaaacaaaacagataaaaataattaccataacctgttaaagaataagcaatataaaaagatgtaaatgatgacatcaaaaacacaaaatttgggagtcgattttttaaaaaattttcttgcaatcaaaattaagttgttatcagttcaaactaacttgttataactataaggtattctgtgtaagcctcatggtaattacaaagcaaaaatttttataatagatacactaaaaataaaaagcaagggattaaaacatactgatagaagaatcacttaaccacaagggaagagattaagagaggaagaaaggaacaaaggatctacacaacaactagaaaacaagtaaaaatatggcactaccaagttcttacctatcaaaaattaccttgaatacaaatgggttaaattctccaactaaaagacatagagtgtttggttttttgttcttgcgatagtttactgagaatgatgatttccaatttcctccatgtccctacaaaggacatgaactcatcattttttatggctgcatagtattccatggtgtatatgtgccacattttcttaatccagtctatcattgttggacatttggaccgcatattctcactcataggtgggaattgaacaatgagatcacatggacacaggaaggggaatatcacactctgggaactgttgtggggtggggggaagggggagggatagcattaggagatatacctaatgctagatgacgagttagtgggtgcagtgcaccagcatggcacatgtatacatatgtaactaacctgcacaatgtgcacatgtaccctaaaacttaaagtataataaaaataaaaataaaaaaatttaaaaaaagacatagggtggctgaatgaatttttttttaaaaaaagatctaactacatactgcctaagagaaagactttacctgtaaggacacacatagactgaaagcgaagggatagaaacagatattccatgcacatgtaaacaaaaagaaagcaggaatagctatacttatatctgataaaatagacttcaagtcaaaaactataaaaagagacaaacagccagacgtggtggctcatgcctgtaatttcagcactttgggaggctgaggcgggtggatcacctgaagtcagaagttcgagaccagcctggccaaatggcgaaactccatctctactaaaaatacaaaaattaaccaagcatggtggcaggcgcctgtagtcccagctactcgggaggctgaggcaggagaatggcatgaacccgggaggcggagcttgcagtgagccgacattgcaccgctgcactccagcctgggcacacagcgagaatctgtcaaaaaaaaattgacaaacaaggccattatataatagtaaagaagttaatacaacaggagaatgtaacaagcataaatatatatacacccaacattggagcacctaaatatattaatgtttgatctttgtattttctagtctcattaaaagtaagggcaaaaactacaattacttttgcaccaacctaatataaagcaaacattaatagaccaagggggaaatgaagacagcaatgaaataatagtagaaaactttaacaccccactttcaccaatggacagatcatccagacaaaatatcaacaaagaaacactggacttgaactgcactgtagaccaaatagagcaaacagacatttacggaacattccatccaacagctacacagttcacattcttctcaactgcacatggaacattctccaggagattatacattaggccacaaagcaagtcttaactaacttttttaaaatgaagtatttttttcctgccaataatggaataaaactataaatcaacaacaggaggaacaactgtacaaatacatggaaattaaagaacatgcccctaaacaaacaatgggtcaatgaagaaattaaaggagaagttaaaaaatttcttgaaacaaatgaaaatggaaacataacatgccaaaacttatgggatacagcaaaagtagtccttaaagaaaagtttatagcaataaatgcctacatcaaaaaaaaatctcaaataaacaacctaatgatgcatctcatggaactagaaaaacaagaacaaacaaaaccccaaattattagaagaaatgaatgaatacagatgagagcacaaataatcaaaatagaaactaaaaaatacaaaagatcagtataatgagttagttagttctttgaaaagataaaaaaaagtcaataaacttttagccagactaagtgataataaagaagaaaaacagaaataaatcagacatgaaaaaggagacattacaactgataacacagaaatacaaagaattataagaaactactatgaacaactataagccaacaaattgaaaagcctagaagaaatggataaattcctggacacatacaacctaccaaggttgaatcaagaaaaaatggaaattttgaacaaatcaacaatgagcaacaagattgaagcaaaaatacaaagtctcccatcaaagaaaagttcagtacccaatggcttcactgctgaattctaccaaacatctaaagaactaataccaattcttcacaaactattcaaaaaattgaaaaggaagaaactcttccaaaattattttaggaggataatgatcattatcctgatcccaaaaccagacaaaagcacaataacaacaaacaactacaggccaatatcctcaacaaaatactagaaatagaattcaacagcacattaaaagatcatttaccatgatcaggtgggatttatcccagtgatgtaaggatggtttaacatatgcaaattaagaatgaaggacaaaaattatattatcattttaatagacacagtaaaggcatttgacaaaattcaatatcccttcatgataaaaactctcaacaaagtatagaaggagcatacctatatgataaacctacaaacaagatgaaactgagtggggaaaagttgaaagcttttcctttaagaactggaataagacaagcatatccaccctcaccacttctattcaacacagtactggaagtcctagccagagcaattaggcaagacatccaaattggaaagaaggaagtcaaattgtccctgtttggccaggctcaatggcttatgcctgtaatcccagaactttgggaggccaaggcgggcagatcacttgatgtccagagttcgagaccagcctggcaatatggtgaaaccccatctctactaaaaatacacacacacacacacacacacacacatgctagccagacatggtggtgcgctcctgtagtcccagctactcgagaggctgaagcaggagaatcactagaaccccagaggcggagcttgtggtgagccaagatcgcaccactgcactgcagcctgggcaacagagtgaaacactgtctcgaaacaaaaacaaaaacaaacaaaacaaattgtccctgtttgcagaagacatgatcttatatatagaaaactgccaaaactacaccaaaaaactgttagagctagtaaatgaatgtagtaaacttgtagtctacaaaatcaacatacaataattgatagcatgtctatatgccaacagtgaacaatctgaaaaagcaatcaagaaagcaatcacgtttacaatagctacaaaaaatgtccagaaataaattaaccaaggaagtgaaagatctctataatgaaaactataaaatattgatgaaagaaattgaataagacacaaataaatggaaagatatttcatgttcatggattgaagaattaatattattaaagccaaagcaatctacagattcaatgcaattcctatcaaaattccaatgtcattcttcacagaaatagaaaaacaatcctaagatttgtgtggaaccacaaaaaatcccaaagagccaaagaagtcttgagcaaaaagaataaacctggaggcatcacactacctgatttcaaattatactacaaagttatagtaaccaaaacagcattgtgttgacataaaaacagacatatagaccaatagaacaaaatagagagcccagaaatacacccaaacatttaaagccaactgattttctacgaagttggcaagaatacatgatgggtaaagaacagtcttttcaataaatggtgctgggaaaactggatatccatatgcaaaagaatgaacctagaccccctatctctcaccacgtatgaaagtcaaataggccaggcacagtggctcatgcctgtaatcccagcactttgggaggccaaggcaggcagatcacttggggtcaggagtttgagaccggcctggccaacatggtgaaaccccgtctttactaaaaatacaaaattagccaggtgtggtggcacacctgtagtcccagcaacttgggaggctgaggcaggagaatcacttgaaccccagaggtggaggctgcagtgagcctagatcgtgctattgcactccagcctgggcaacagagtgagactctgtctcaaaaaaaaaaaaaaaaaaaaaaaaaagaaagacagaaagaaaagaaaagaacaatagattaaggaattaaatttaagacctgaaactctgaaattattagaagaaaacatagtgtaagcatttcatgacatcaatttgggcaagaatttgttagacaagacctcaaaatcatgagtaacaaaagcaaaaataaagaaattggattacatcaaactagaaagcttctgcacagcaaaggaaacaatcaacagagtgaagagacaacctatagaatgggagaaaatatttgcagattatacatctgacaagggattgatatctagaatatataaggaactcaaacaactcaatagcaaaagtccaaataatcctattaaaaatgaacaaaagacctgaatagacatttctccaaaagagacctacaaatggccaacaggtatatgaaaaatgctcaacatcactaaccatcaggaaaattaaaatcaaaactacaatgagatatcacttacccctgttagaatgactattataaaaaagacaaaataacaagtgctagcaaggatgtggagacaaagaaacccttatacactgttggtgggaatataaattagttaagccattagagataatggtatagagatgcctcaaaaattaaaaatagatctatcatattttctagcaatcccactactgggtatataccaaaaagaaatgaaatcagcatgttgaagaaacatctgcatccccatgtttatgacagcattattcacaatagtcaagatataaaatcaacttaaatgcccatcaatggatgaatggataaagaaactgtgatatagatacacaatggaatactattcatccatttaaaaaagatgaaatcctgtcattttcaacaacgtggatgagcctggaggacattatgttaagtgaaataagccaggcagagaaagacaaatactccatgatctcagtcctatgtacaatctttaaaatttgatctcatagtagttgagattagtgattctaggaagataagggggaagtgggagatggggagagattggtcaatgggtacaatgttacaggtagatagaaggaataagttctggtactctattgcacagtagggtgacaatagccaacaataatatattgtatatttcaaatagaagagaggattttgaatggtctcacaacaaagaaatgacaaacatttaaggtgatggatatgataattaccctgatttgaataattacacaatgtatacatgtattgaaacatcacattgtacccataaatttgtagaattatttatgtgtcaataaaaagtaatacagttaaaaaaataaaattgcccattaggataaataaaaagacccacacacaaaattatcattgtggcatttcagagcacagagagaagatacttaaagcttcttctgagaggaacaggacgcatacaaaagaatgggaattagactggcgatataattaagcaatattgtaaaagatctaagggaaaaattatttggaacctagaatttttagtcaaactatgaatcaattttgggggaagaaaaaagacattttcatatatagagggccttaatagtcactgaatgtgtactatagtaaaaccagaaactacataaaagaggaatttgggagattcagcaacccaagagaataatgaagtatgagggggatgttttctccttagttcttttccgtatttttcaataatttgataataaacatgcataattttataattaaaaaggaaattaattttgacaacatgcaagttcctgttctcacataccttatagtggagggacagattgtagtcaaataagcataataatacatgcaaaattacaaactgagcattactctgaaggaaaattacataattctatgtaagcctataatacaggaatctgacctagactggggaatcagagaaggcttccctaagcaagtaccccttgaacttagctttgaaactgggaaaatgaggcaatgtgagatgaagctgttagaggtattaggaatcaaacctattggggccttctagtccttagtagagagtctggactttattctatgtggaatgacagcctccagtgggttttaggctggcggatactacaatcagatctggaatgcagaaatagtacaccagtttctttgtgggtaaaagtcttagaggggagaatatgaccaactgtagggagacctgtaaaaaaagtttatcagtagctcagacgagataatggtaacttggattaagatagtggtagtagtaacagtgaaaaactagatacatttgaaagcttttagagccaaaataggaggcagctgtgcccttgttgttaccagtgtgggatctgaacacatgactacttgggttcaaatactgagcaaattaattaacctctctgggcatccgtttcctctcctgcaagacatggatgataatggtttctacattcatagggttgttatgaggaatgaatgaattaaaacttgtaaaatactttggacagtgcttgacataaaacaagtgctcaatacatattagctattattgattatattgccctggtcagtgtcaaactgcatatgggagatgagaatggtaacaaggataactctcacttgcatattcaaatgcaggatgctgccattcactgttataaaaaactctggaagagaatgaagtgatgaaaattgtaaatttggttttgaacatgtgggttttttgagatatctaggtggagatgttgagaaagtgattggctgtatgagcctggagttccagaagaggtcagcaggggagacagaagaaggagcagtctgagaagtaggagaaaaaaacccacagagatgttggcacagaggccaagggaagagagagttttaaaaacgaatgaatggtcaacaggtgcaaataaagactgaaaaatgtccattggatttagcagcatgatggtgattggtgaccttggcaagagctgttggtttgatagtagcccaatgttcttgataaatttgtttacaagtcaaggtagcaataaagtgtctaaagtcaatttgtccattctgtcctagcaagtgttttccatttcagattctctacttcatagccataggtgtcttattcctactttacaggtctgattggatgccacaggaaatcagtctattggcatgtgattggaatgggcaccactcctgaagtgcactcaatattcctcgaaggtcacacatttcttgtgaggaaccatcgccaggcgtccttggaaatctcgccaataactttccttactgctcaaacactcttgatggaccttggacagtttctactgttttgtcatatctcttcccaccaacatggtaatatcttggatctttaaaatgaatattataaatatccagtcctacttttaataaaatttactggacaatgtacaggaatatagtgtgttgctgaaggggacattatagagttactgtattagacctcagccaagatcccctagtttccagcttccagtgtaaagtttttaccttgactataaaagggcttgagtattagtaggactcatggatttttagttaaatgtctgtgatggagaaaagatggcttatggatgattgaggtgggaaaatgaggagaatagtatgcccttggtttctcagccttatcccattaattacgctccaatattatggagagaggaactgcaagttgtagctgaagagattttttttttttttggagaaatctagggaaatgggaaaaaaaggcattgtccagattgcaactgtaagggctccactatatcattagtaatgcccagagcagtaaatagcaaatatgacaggctattgtagagcttgacttcagacaccagacagccagaggcactctgtagatacctggcagtagatgagagacacctgtgaaactgagggcaggtcaggagctagtgaattttagaagtaacatgggattgaaaggactatttggtgggaactttggaaagggtcaaaggttctgtgtaagcaaattaggacgatggtaactacagttttaaattattgttaatgtaactttatttgtaactgctagttgtgcaaattcagattgcatcatcatttcaccccaattttccttacttttgtatttattctgctaactcttaatcttggatcaacctaataaccctctttctctacccctctcgtggccattgaaggctcttagtcagtttgtgctgcaataacagtataccacagaatgggtaatttataatggacagaaatttattggctcacatttctgggggctgggaggtccaatatcaagttgcctttttctgcgtcttaacatggtggaaggcattatatgacaaaagggcaaagaaagggtgagagagagcaagaggagggtgagctcactcctgtgataacaaatccactcccatgaacactttccccagataactgcattagtccattcatgagggtggaacgcttatgacctaaacaccttttatatgttcacctctcaataccatcacgatgataattaaatttcaatatgagtttcggaggggacagacattcaaaccatagcaagagttattggagaaaaatgtcggagaggcctaatcttttatatttaatagcatttctttcttcctattactctcatattaaccttctcctcaggttccttggttgacttagaaaagagaattgatcttgccatgcatccaccattttcctccttatgttctattagtgaccttgtttattgtcttctgtagtgattaagaatagaaatctctcttccccatgtgtcacataatatttatggaattttgacaagaccttagtggacaaaatgtgtcatactgaatgagtaacaggaagttgatgcacaaacaacattcttgcaggcacagaggaataggtcatttacttgtatatgatcattgtcaatcaatcattgtccagttggaccccgattcagtttattttttgttttgtttttctccttttcacagattctatccactaattttaatctttatttttcagaaaaaaatgctttatcttattgaacctcagaccaaacactttgtttttcgatgcagactgagttatgtttaaggctacatgaaccccagactagttgtttgctgctcctaaaaccttccctgttcctcataatcaagtaaacaggtctcccttcttagaagtatttgatcttcaaaattgccctgtggtataaatagggcaggaattattattatccattttacaaagcatgaagatgagactgagaatgttgaatacatttgccatagggtttacaactagtcacaggcagacatgctcttaaaatatatatctccttgattttaagttgtatcttgtcatggttttatgaacttggaacatgtcttaaagtttatatctacactaacatttttcccaataagctgttattaaatcaatgatttgtggcaagaagggatagtgatgtggaaagggggggtacttaggggagagcctggaaggcctaataagagagaaagaagtcataaaagttaaggcaagtgatatggtttggatatttatcttcactgaaatctcatgttgaattgtaatttccaatgctggaggtggggtctggtggcagatgtttggatcatgggggtgaatccctcatggcttgatgctgtcttcatgatatttggtcattcagaagtgtgtggcaacttgcactctctgtcttgctcctgctttcaccatgtgacatgtctcctcccccttcacctacccccatgattgtaagcttcctgagacctccctgaagccaagcagatgccagcaccatgcttcccatatagcctgcagaaacatgagccaattcaatctcttttctttataaattacctagtctctggtatagaacagcctaatatagcaagacactctgacattgtttggtttgtctgactccagatggcatggaagcttatgtcaaagtagacagctgtccagaggaaccccaactacgaatgaaaaataatgaagaagcggaagactatgatgatgatcttactgattctgaaatggatgtggtcaggtttgatgatgacaactctccttcctttatccaaattcgctcagttgccaagaagcatcctaaaacttgggtacattacattgctgctgaagaggaggactgggactatgctcccttagtcctcgcccccgatgacaggtaagcactttttgactattggtactctctcttccccatactcaaaaagttcttaccagttattcaaaccaacaaatcctgaagccatgtttaaggttaggtacaggtatggaatcaaatggcaagggtattaacatttggaaactaacatagctgagcatcagagaagcttgtatttttctcactccttgccttgattgaatcatataagctgttttagagttggatttgagcctacctagaatttttcttcccaacctctcatctttttttctcttatacagaagttataaaagtcaatatttgaacaatggccctcagcggattggtaggaagtacaaaaaagtccgatttatggcatacacagatgaaacctttaagactcgtgaagctattcagcatgaatcaggaatcttgggacctttactttatggggaagttggagacacactgttggtaagttgaagaaaagatttaaggtcaggtaagaagaaaaagtctggagagttttgagtttctaaaatacctcataattcagccttgtctccaatggacatgatcttttaaaagctataaatgttacacaaataatagctgattgtatgtatttaaagtttgagtatatagaataaaaatttaatgtcacccactaaactcgacactcctttgaaatactgcttagactttgatacatatccttccagatctttctccattaattatgtcatataggagtcagcagactatggcctgtgaaccaaatttggcttgtggcctgcttttgaacagtccatgagcttagatgagattttacatttttaaaatattgcaaagaaaagaaaggaggatgggaggaaggggaggagaaggcggaggagcaagagaatatgtgacagaggctagatagggctcacaaattttagagtacttactatccagccttttccaaaaaatgcttgcttgctcctgatctaggatattaagaatgagtatggtgtaagtaacagaatactcaatggacagtggtttaaataaataagggtttattttcttcacaagaaatttgaagattggtcgttggttccataaattcagccgctgaagaatgtcatgaagaacactggtttttagatatggagttttgttagatactgccaaactgactttcagcaattttgtaccaatttatatcccctaccataagtatatgactgcccttttccccacaccattgccaacaacatatattataaaccttcagaaaattttccaatttgatgagcaaaatgtttatatgttgtcttcatttgcatttccctggttagtggtcaaattgtatattgtttcatgtttgttggctatttgtataactccctctgtgaattgcctgcttgtaaattttgtccagttttctatttggtcagtcatcttttgcttatgtatttgtaaaaggtctttatagattatggatattgacacattgttatttatctttcaaatgttttcctcacattgtcacttgtactttaactcctttatgatattttttgtccttcaaagatttttcatctttatatagtcaaaacctcctatcttttatcaatcttttcatttatatgtctctggatctttttcacttatgttttctgcctgagaatgtctttgccacccccaagacactacaaaaatagtctatattttattctcttacttgtatagctttatttttacagtgagcaatctaattgccctggaagttacttttgaatgtagtgcataattcaaatagaaattttcccaaatggcagctgacacaaccaatccttttttcattaatttgaaaatgtcttctttatcatatactaaattgctaaaatctgggatttttaattctccttaactaatctgttaccaccctgttttaatgacttcaactttgtgatatgtttgatatctgtatgacatcttctttcattgtacttcttcaaaatttttattagctattattgtacaatttttcttcataaattttgtgtacgtattttttctatttttcattttttgaagattgtataattttattttttattcattaatttttaaaatgcataatgacacaataattttacatatttatagggtactttttgtgtattttgagttacttttactggctaatttaaaaatagataaacaagagcatgcaataaaatgtaaattttcctccctcttggacttccaaccccatagtctgacagacagtcattgctgtgggtttgtatactcccctccagaagtagtgcatacatgtacaaatgtgtgtgtgtatgtgtgtgtgtgtgtgcatttcacacaaaaacaagagcagtgtaaattggtctgtaccttgatttttaaaaggtaacaatatattttgaattagccaggcatggtggcacatgcctgtagtcccagctactctggaggctgaggcaggagaatcgctcgaatctgggaggcggaggttgcagtgagctgagatcgcaccactgcactccaccctgggcaacagagtgagactctgtctcaaaaaaaaaaaaagtaacaatatattttggatatcatttcatgtcaacatatatagatctaccccattctttgatttattcaggttatactctggataccatgctgaatcctacacttaaacattacctcaaaatggatcaaagataaaatgtaagagctaaaactacaaaattataagaaaacaacaggataaatctttgtgatcttgaattagacaatagtttattggataggacaccaaaaccaacaagcaacaaaagaaaaaccatttgacccagccatcccattactaggtatatacccaaaggaatataaatcatgctgctataaagacacatgcacacgtatgtttattgcggcactactcacaatagcaaagacttggaaccaacccaaatatccaacaatgatagactgattaagaaaatgtggcacatatacaccatggaatactatgcagccataaaaaatgtccccgtttgcagatgacatgattgtatatctagaaaacaccattgtctcagcccaaaatctccttaagctgataagcaacttcagcaaagtctcaggatacaaaatcaatgtgcaaaaatcacaaacattcttatacaccaataacagacagagagccaaatcatgagtgaactcccattcacaattgcttcaaagagaataaaatacctaggaatccaacttacaagggatatgaaggacctcttcaaggagacctacaaaccactgctcaacgaaataaaagaggacacaaacaaatggaagaacattccatgctcatggataggaagaatgactgggttttaagacaagagcagaagtggaagttgcatttttatcctcatatcacacacctcagatctggaggtgggattgatattttcagggttcttcgctgcagcttccatgttattgctcttccattctctctctctctctctctctctctctcgtctctgtctctctctctctctcttgagatagggtctcattctgtcacccaggctggagtgctgtggtgtgatcacagctcactactgcagcctcaacttcctgggctgaagtgatcctcccacctcagcctcccaagtagctggtactataggcatgcaccaccacgcctagctaatttttttattttttgtagagatgaggtctcactgtgttacccaggctggtcttgaagtcctgggctcaaacgatcctcctgcctcagcctcccaaagtgctggcatgagccactgcacctaggcctttgttttcttttaaagctggtgcaatcaggcaataccacctgctacccttgcttaatactgtaatcaactgtcctcttggtcatgcctgctcatgcactgaagattttatctcctgaaacactgtctctttctctattatcagtgaatttaatgcccaaatagtaataaaggctgagaggaagcagtgtcctcaccaggcatctaaatttcaattagtgtgagaaggtgcagagaatacttcctgaagcaattgaaacaatttttaaagaagtggaaaggggcctttagagagaaacctaagtactgtcagccctctacattgtcaactgaagaatcctaagtttgtaaatttggagtggaaagggttgcaggctgggaagtgtagcctctggcagcaaatggaagcaagcactttgaagaaggaaggatgagataagaatttatgctgaatgagttggctaagtatacatatttaacaggttccaggaggagctgtgaatatttatgatggggcacctgcaaccacacatgttacatacattccatgttcactttggggtggagacttaacatttagatgcatgaaaattaggctgtatatgtcaaaagatgaaacagaggacacagaggcagcctctgtaaactggccagagccagtccatggtcagtggtctctcatcaggaagcaatgcttctcggttgttatgataaaactgcacaaagggaggggaatccaccacgtctttagaaaggactggtttatgtttaacccttaagaaagaaagtctaacggcagattagggagggagggaatgtaacaaggcatgcccgatctcccatcccatcatggtcagaaactcagtttttaagccatctctggggtctccttggccgagaaaggggtctcttcagtcgtttggggatgcttaagattttatttttatttttcagtatcactggatttctagtctcatattcaaacaaccattgattgaaagtattcaaaaaacaaccccaaaacaataaaagataataatacaacaataaacaataatacaaagaaacaatacggtaaaacaactatttacatagcatttatgttatattatgtactgtaagaaatctagagacgagttaaagtacatgagaggatgtgcatatgttatatgcaaatactacatcattttgagtaagagacttgagcatcacagattgtggtatctgcaggggtcctggaaccaatcctccatgcatgccaaggaacaatttcatgaaaagaccaaatattttgagttttatctagcctcaaattactataatgtagatagaggccacttttatttatctggagttagaccacagttttcttgttgatcctagtcgttttaggatttgatcttagatctcgcttatactttcagattatatttaagaatcaagcaagcagaccatataacatctaccctcacggaatcactgatgtccgtcctttgtattcaaggagattaccaaaaggtaaatattccctcgatttatagctcttttttacctgtagatacagatgagataaatatcatcaataacaactaaaattatgttggtcctttctccagctgttggccggacctcaagctccagtctaaagttataaaaatcaattataggaatcctcaggtgatgtttcatgtaaattcgtgaagagtcgcctgacatgtttttcctattacctagcggtgatgttcaaatattccacagccaattagattccactgcaattggttccactgcaactactgtaaatgccctaaaatcttgaagctggttcttctggcacttaagataatttttttttctgagtacggttttcagctacattccacacttttggtatctagtgtggtattccacactttgggtaactagtttgatattttcaggattctttgctgcagcttccatgttattgctcttccttgctctctctctctctctctctcaacagggtttcactctcacttttggtatctagtttgatattttcagggttcttcgcatattcatttctaaatagttcacaactccagtttttatttactatattgtttgctgtttaaagatttattttttcttttagtagattggatgttatgtatattctttctattatttaattttggatgaatatttatcaaaataatagatgtgtatgcttaaaactacaaaagggctgcctccctagaggcatccatttttaagaatttctgtttttgatttttggtggttatctctacatctctaaaaagttacttatactgctaactctttgtttttcaactttagacattatatacttactttgttttgtgcttttttccattcaagttgtttcagttttatcagtgttttcagttggattggctatcattagaactttaaaaatatactaaacatcaacttttagtaagatattttccaatcatggattgaaaatatcttttgactccatacttcataaattaaggatattaaaaactgtacccctcacttttcctttccccaaacctttcttttctctactgctgctagccattcctttacttttacaaaactaaacttgataacatttacattttgtgctgtaatttgaaataactcttccttgctttgtctatatattttctctaaagcttaaaaaattaaaaaacagcatttgtattattttagtattttagcaagtttcttttcataaatgttaactgcagaactgggtaatatgctatgattgctctcttttctacagctcaagtgattttactattaagataaaataatatgtggaaggaaaaaagttgatctcatagaagtagagataaaatagtggttactagaggctaaagaggggaaggggagggggaaatagggagacgttggttaatggatgcaaaattccagctagataggaggcataagtcctaatgttctatagcactgtagggtgactgtagtcaacaatgacatctattttcaaatagctagatgagaggatttggaatgttcccaacacaaaggtgtatcctgaagtaagactttgttttcttttattcggaaaagaaatgtaggcttcttcaaccctatttcttaggcctttcagcttcttaatcattctatgtattgcttgctatccaaatcttttattttttttttgagacagcgtctcgctctgtcacccaggctggagtacagtggcacgatcttggctcactgcaacctctgcctcccaggctcaggctatcctcccacttcagcctcctgagtagttgggaccacagacgcacactaccatgcccagctaattttttttattatttttattttttgtagaaatggggtgttaacttgttgcccagactggtgtcgaactcctgagctcaagcgatctgcctgcctcagcctcccaaagtgctggaaccaaatctttttcttcttaaagacattcttgtagtgaatagcattaactacttttcccttgtacatttctattttttgatttcttcttttgtttttctggaagtatattctcaagtaacttctaaatatgtggtacatagagggtgaactttctgaatccttcagtatcacatgatgggcagacagactggttataaaaattttcccgctgggtgcggtggctcacgcctgtaatcccagcactttgggaggccgaggcgggcagatcacttgaggtcaggagttcaagaccagcttggccaacatggtgaaaacccatctctactaaaaatacaaaaaaaatagccgggcattgtggcgtgtgcctgtaatcccagctactcaggaggctgaggcaggagaattgcttgaaactgggaggtgaaggttgcagtgagccaagatcaccccactgcactccagcctgggcaacagagcaagactgcatctcaaaaaaaattccttcccctgttttctaatattcattattgccgataagaattctttatttgcatttctttatggaagaatggcatagtgacagagttctggggagattttgaatgtgtgtcccgaaatttggaggcatacgtggatagttactggtaacctgcttttccatggagaattttgaaggctgtaatgcccataatagtgggcaagaagagagggcaagagtggagcagtttaccttcctgctgtttgacatgagtttattctgtaacaagtgaatactgttgaaagtagctgggctttatcccttttgaagatattctacccaagaaggcagttaggcaggctgaggggatagcagaaccaatagagtcttggatatatcactggaagtaagaagagctgatggggagaggagagttgcagaaggatagctgaaagaaacatctctcatgtcatggaactatgtaatgctgaggtccccatggtaactctaaagaaaccatacatgtgtcctatgaaaagaccagcatttgggcacctcccacacagagaacattgatgaccaaatagtgttgtcaaagatagagcagcaggacctgttaaacaagagtctgtttgccctttcttctattacctaccctccctcacccccagctcctggaaaagggaagagaaggctcagaaatattgaaagaacatactacaccattccctttctttctttctttcttttttttttttttttggagacagagtctcgctctatcccccaggctggagtgcattggcatgatatcggctcaacctctgcctcccaggttcaagcaattctcatgcctcagcctcccaagtagctgggattacaagtgcctgccaccacacctggctaatttttgtatttttagtagagatggcgtttcaccatgttgaccaggctggtctcgaactcctcacctcaacaccattccctttctatggatcctctaaccataggtcaggcataacttactgaggtgaggaagagcttagaatgaatataaaattaaaattttgatttagattgtatcttcaggtatgaaacatacccagaatgagacttaattactaaaatcagttcttgtcctgaggacccattaccctgagggcagatctcagttcttgctccctttcctcacagaagtcagagactacaccttaaaactccaatgccaagctctttggcatatattcaggcctgacactttcacagtcaaccggataatcaattacagctttttactttttaaaaaaattgtttgaatcttaaaattataataggtgcgactttagcttccacttgctcagaaacttcatatgtacatacagatttgtagaacccttgcaacaacaacatgattatcaatatgtggcttgttgtactctaattgagctatttatggttttgcttgtgggtaggtgtaaaacatttgaaggattttccaattctgccaggagaaatattcaaatataaatggacagtgactgtagaagatgggccaactaaatcagatcctcggtgcctgacccgctattactctagtttcgttaatatggagagagatctagcttcaggactcattggccctctcctcatctgctacaaagaatctgtagatcaaagaggaaaccaggtgagttcttgcctttccaagtgctgggtttcattctcagtgtatgtccccttataacctgaagaaaatataatggtttgcaatataggtcagtaaaagaaatgagcttagcttttactaaatttgagtttcacgtagtaaacgtgcctgctggatggataggccatagaatgtaggccctagatttttcctatagtactcattcccagtctgggatttagctctctctagctgatcctccccatttttatatgtccaattaccacctattttcagatgacccacagatttatatctacagcctagatttcttccatggacatctcattatgggtgactcaaaagtacctcaaaattaacatgtctgcagcatgtagcactgttgcaggaagtcagggaccccgaacagagggactggctgaagccacggcagaagaacataaattgtgaagatttcgtggacatttattagttccccaaattaatacttttataatttcttacgcctgtctttactgcgatctctgaacataaattgtgaagatttcatggacatttatcacttccccaaccaatactcttataatttcctatgcctgtctttactttaatctcttaatcctgtcatcttcataagctgaggatgtatgttgcctcaagaccctgtgatgattgcgttatctgcacaaattgtttgtaaagcttgtgtgtttgaacaatatgaaatctgggcaccttgaaaagaacaggataacagcgatttccagggaacaagggagataaccataaagtctgactgcctgcagggccaggcagaacagagtcatatttctcttcttgcaaaagcgaataggagaaatatcactgaattctttttctcagcaaggaacagccctgggaaaagaatgcattcccagggggaggcctctaaaatggccgctctgggagtgtttatcttatgcagttgaagataagggataaaatatgccctggtctcctgcagtgcccccaggcttgctaggattaggaaattccagcctggtgaattctagtcagaccagttctctgctcttgaaccctgtttcctgttaagatgtttatcaatgacaatgcatgcacagcaggacatggaacctcattagtaattctaatttcgccctaccttgtgatcttgctctgtccctatttgccttgtgatattttattgcctttgaatcatgtgatctttgtgacccacaccctattcgtacactccctcccctttgaaaatcactaataaaaacttgctggttttgcggcttgggggcatcacagaacctgccgacatgtgatgtcacccctggagacccagctgtaaaatttctctcttttgtactctttctctttatttcccagaccggccgacacttaggtaaaatagaaaagaacctatgttgaaatattgggggctagttcccacaatatagcacagtgcatctcacttagtaagagcttaataggctacgtgcggtggctcacgcctgtaatctcagcactttgggaggccgagacaggaggattgcttgagctcaggatttcaagaccatcctgggcaaaatagtaagaccttgtctacaaaaaaaaaaaaaaaaaaaaaaaattagctgggcatggtggtgtgtgcctgtagtcccacctactcaggaggctgaggtgggaagatagcttgagcccaggaggtcgaggctgcagtgagcctggatgacaaagcgacaccctgtctcaaaaaaaaaaaaaaaaaaaaaaaaaaaagcttaataaatacttttgggcaaaacatagggaaagatataaaatatttcaaaatatggctagaatttggaccatttctactgctttaaaaaataaagctaaattctctgaacaagaaaagcttagttcttcacaaaaactcattgctcggccccagaataactcagtgccatattgctgaggcttgactacatgtccatttgattatatttatgatacataagatccctactagtctgaaaacatttcatatgtttagagagtaaagtatatgaactttggtgccaataaaacacatggcacataaactcagagaagtataaattttgccaagtacttgtcctgaccgatttttcctaactatagttttttcgtcacttttgggaagagaactgaaatattattctatattctccaatctcctctcttcagtattttggtttatatagctataggttataaaaaatgaggtttatacatattagtgaggtttacatatgaaatcttagcagatccaattagcaagcgactaattcataaatctggttcatatacaaaatgctcttctgaaaaaaatttgaatgttttaaacagaaaatttaaggtattagtgttgtttgacatttttgtggttcaccttatctttcttatttgatttctgtttttctatttttaattttttatagccttgtggaaggtcagttgctagatggaagtttaggaaagtcagtatctcatttgacttaactaacttaagaaaggcactgaataaccacttggttctttaaggagttaaatcttctaatctgaacatgaagagaataaggctacagactgtaccaaataaatcagctagcatatggccttgggtgcagaaaaaactaagttcagtgggatcagtcaccctcttgtcctggggacacatttgttgtaagcatatactcactgctcatagcacccaccctcaactcccaagccctggtacatgcctaagaggaaatggaattaaaccaatggattagatatatcacatgcatgccatcgctttcatcatagactgctagctcctacctgacaacatcagtagcatttctttacccctttcaatatatgtaattaacagataatgtcagacaagaggaatgtcatcctgttttctgtatttgatgagaaccgaagctggtacctcacagagaatatacaacgctttctccccaatccagctggagtgcagcttgaggatccagagttccaagcctccaacatcatgcacagtgagtaaagcagcacttaagtccagtgggtggtgaataaagaaaaattgatgtaatcaaagtgatgtccagataatgaatgaattgtatgtgcacataaatttaacaattatgttacctataaatgtataatttttactcaaacacacgtgatcatataacccatattttaaaaatccagtcaccattttttcctttcaatatttacttgatttccctctcccttttaattccctatctccttctatattacatcttttcaccaaccattccatgcccaggtaacatattttaagacatattttctctataattatataatcatatataaacacatacatacattgtattagtcttctagtgctgccataacaaagtactgcagactgggtggcttaaccagcagatatctattgtcttacaactctggaggcttgagatcaggatgtgggcaacgttggtttcttctgaggcttctctccttgtcttgtagatggctttctcccttgtcttcacatggtttctcctttatatatctttgtcctaatctcctcttctaataaagataccagtattgttgggctagggcccaccgtaatgaccttattttaactaactacctatttaaaaacactatctccaggtatagtcacatgctgaggtactggggtttaggactgcaaggtataaatttgggatgggggaacacaattcagcccattgcatacatacacatgtgtatatatttatatataccacaaatctgaatggtcaaaaatatggtaaaaaattccaattgcactatcctacagggaaatgcgaaatagaataacaataggatagcactttatacccatcaaactgccaaaattataattactagtgggcttgtggataaaagagtgttctcatgctatattagtggataagtagtatagtcttttcaaaaccaatatatgccttttgaaattctgattattaagatgtttaagatggagtgagccacatttccctgtgtgtcccactggatgcaactaaaaatcctgaacaggccgggcacagtggctcacgcctgtaatcccagcactttgggaggccgaggcaggcggatcacgaggtcaggagatcgagaccatcctggctaacatagtgaaaccccgtctctactaaaaatacaaaaaattagccgggcatggtggcggccgcctgtagtcccagctactcaggaggctgaggcaggagaatggcgtgaacccggaaggcggagactgcagtgagccaagatcgtgccactgcactccaggccggcgacagagtgagactccgtttcaaaaaaaaaaaaaaaaaatcctgaacgaaatgcatgggaaccttgaaaagttataatgtgagttatactcacctaccagaatgtggcatatgttacaattctatgcccctcctctcaaagctttagccctttaactttgggttgagcctcatatttagcttgaatttctagtaatagtgatatattattctccagagttaaagtcctttactatccattattctaaaaattttaaggttgtttagtcctttgagttgcatttttattttttacatagttcagggtattgctttccttctgaaggattcagatttcacatttgtgcaagagtctaatgcttagtatttaattctagtggcacagagctttttcttttctccctcttctctccagcctcatggctttggtttagaattccttcagcctgatagaatattgtattttataatttccttattgtgctatttactagatatttgttcttctatttttttctattcataatttctccctttcccaccacatctttttccaagtaggatgtgcacttgccacagtatctggacagttaaactgtctcattttcttggagacggtgatgaaaactagagagatatagtgacataagcagagccagaaaacaatttcactgaagatgatatatattttttttcctctgggatttctaatatagcttttggtggagataagagtctggaattgagaaagaagagattggaattgagaaaaagagtctgagaaagcacagggagagacacaaaggcagagaccaagagacacaggggaaggatcttcagaggaagagtccagggagaaagatgctaagacagagggataagaaaagaagaaaaaaaaggaccaggaggagagagacccaaaccataaatcactcctatttccattagcagtaaaattgataatctattttcatacaatgaaataccatgtgacaatgaagattcacaaaaataaagctatacacaacaatatgaataagtatcacaaagacaatttttagtaaaatggtaagtgtcaaaagaatatatacagtattatattatttacataaagttcaaaaatgggcaaaattaacttatatagtttagggatacagaggaagaaaagtataaaggttagtaaggacatgattataataaaagacaagatagtggctacctcttagaaagagttcatttgagaataaacacatgtgttttgtggggatagcagcaatattgtatttcatgacctagatgtttgttttataattttgtgttttaaaaaattgtaggatttatgatttatttcgtagatggatcctacaaatgatagggaaattgcagtaggaatgaagaggaaggaacatgtacaggatttgtttagaagatagaaggcacatgattttgtaaataattagctatgtttggtaaaggactaagaggattcaaagatgattaccaaatttctgatatgggtaactagaagaagagtgagacaaaatggaagaaagtgtatttaaagaaatgatagcaaaaactttccaaatctggagaaagatgtaaatatccacgtacaagaagctcaaagatctctagtcagattagattcaaacaagactatatgaagacacgttacaatcaaactgtcaaatatcaaagacaaagagagaatcctgaaagcaacaacaaaaaagaagcaaaccacatacaaggaaattccaataaggcagaaactttacaggtcagaagagggtgggatgatatattccgagtactgggaaaactttacctagaaaatgtttccttcagaaatgcagagagataaagactttgccacacaattccagttagacaagagaaataaattaaagacatctattgtacactatggtgactacagttaataaattacccattccaatatatacatatataaacattgtgatgtacatcataatatattctatttttccctgtcaattaaaaaataaatttaaaaagattggatagagaagaatcagccattctagtaattaagcctgaggaagcttacattccagtgatttcagataaccattatgcaagttaaggaataaactggataggatgatattaaaaaaacaaaaccaccaatgagatacaccagaatggctaaaattaaaaaggctgtccataccaagtattggtaaagatgtagagtaatgagaactctcataaatttctggtcaggaaatccaaacatcgaaagccaaacatcggcataccctattgactcaggaaatccactcctagtatacacctgttatgtcctgaatcatgtcccctagaattaatatgctgaagccctaacactagtatttcagaatgtgactgtatttggagatagggtctttaaggggtttattaagttaaaatgaggttgttacaatgggccctaatccaatatgactagtgtccttataagaagaggaaatgtgggccaggcacagtggctcacgcctgtaatcccagcattttgggaggccaaggcgggcggatcacgaggtcaagagatcgagaccatcctggccaacatggtgaaaccccatctctactgaaaatacaaaaattagctggacatggtggcgagctcctgtagtcccagctactcgggagactgaggcagaagattgcttgaacccaggaggtggaggttgcagtgagcagagatcacgccactgcactccagactggcagacagaccgagactccatttgaaaaaaaaaaagaagaggaaatgtgtacacacagagacaccagggatgcatattcacagaggaaagaccaagccaaggagaggtgtcagtaaaaaccaaacctgccaataccttgatcttggaattttagtgttcaaaactgtgagaaaacacattcctgttatttacacctcccagtctgtggtatattgttatggcaaccctagccactagtacagcacccaaaagtagtgtgtacatatttcacaaaagacatgtaactatttaatccatgtggagtgtcaaaaggcaaaaatacaacaaatgtattttaaagattgtaattggcttttatacatgattctagaatcagatagccctcagaaccaaatacagaacagcagccagcaacatagtatggatagaaattggaagtgaggtttagagacagcttaattgattacagttgggcatttttgccttatttgaagctgttagtcgcctgcaattgatggaagttcagctgctataatcggctgagactgagctgtttgttataaaagcatattcctaaattaggctttcagttagttcatcaactaagccaggctgcaactttgttgtgcaaggactcaagtgcaaaggtacccttaggcaaaattcagattaatttaaaaggactttacttttgttagttatgtgaaatgaagtggaatctattttttccaagtggatagtcatattttctattatcatttaccaactagctgatttttttcctgtactggttggagatgctgcctttattatatattaagtttcaacttattatatattaagtttccgcttacatcttgtcagtttctggactccatattttgtttgatatatttatctattctgcattaagactgcatttttaattataatagctttataatatctcaatgttgtataggaaaaaaacttcaattattaattagttatactaagccaatgtctaagtattgcttagtggtttgtgggcaaccatcttacacagtacctagtaacagagtagacaagtgtttattgaatggatggatgaatggatgtgtggaagaggctttcagaaacaattcccttcatagactaaggccaatgttacttttgcttagctctttagtttgaaataatttaaaatgtacagaaaagttacaagaataatacatggaacttgcacacaccctttacccagattcacaaatgtttaacattttgcaattttgtttttcattttcttttctttatatacacacttctgttacttattttctatttgaaaattagttgcagacatcacatccctttacctctcaatactttagtacacatttcctgtgaataaagatatcttttacataacagacacttcaaattgataaagcacatttccataatttacaactggtattccagttgtatcaaccaatgctgtcatttatagcattttcttctttgaagtacagggatctagtacaagtaactacttgtcctgcttctttcatttccttgaatctggaccttcatcagatggtaactttaagcacccaaaggtttttttctggtttctcctctgtgtagtttaagaccatgcaaacatcttgctactcatcaaaatgccccccatataacatccaaattaatctttatcatgatggtttatgactgtctcctcacattgggattggggcccaactgattattaacaatctacttttttggaagatataatatctcttcctgggaataagataatgggcataacatataataattcctaattgtatcatgacaatcacaatccaaaatactaaatctgtgatgtgtctaaatctcttttccccattgtttttgcaggcatcaatggctatgtttttgatagtttgcagttgtcagtttgtttgcatgaggtggcatactggtacattctaagcattggagcacagactgacttcctttctgtcttcttctctggatataccttcaaacacaaaatggtctatgaagacacactcaccctattcccattctcaggagaaactgtcttcatgtcgatggaaaacccaggttagttattatatttttcttgtaccaacagctgtgaatgcttcactagccattcgtatgctcttttgcccactagctcacatgctgtcatttatagcattttcttccttgaggtacagggatctagtttctcctctgagtagttattattttcacccttgcaactaataaacagtttgaaggatcacgtagtagttctatttttagttttttgaggaacctccttactcttttccacagtatttgtacttatttacactcccaccaacagtgtacaagcattccccttttgccacatcctcaccagcattttttaattattttgtctttttgataaaagccatttaactggagtgaaatatctcattgtgcttttggtttgcatttctctggtaattagtgatgttgagcagtttttcatatacttgttggccatttgtatgtcttctttttttttttttttttttttttttcagacggagtctcgctctgtagcccaggctggagtgcggtggcacgatctcggctcactgcaagctccgccacccgggttcacgccattctcctgcctcagcctcccgagtagctgggactacaggtgcccgccaccacacccagctaattttttgtatttttagtagagacagggtttcaccgtgttagccaggatggtctcgatttcctgacctcgtgatccacccgcctcggcctcccaaagtgctgggattacaggcgtgagccaccgtgcccagcctgaatgtcttcttttgagaaatgtctattcagatctttgtccatttttaatagggttctttgttttttttgctattgactagagtttcttatatattctggttattaatgccctctcagttgtatagtttgcaaatatttcatcccatcctataaattgtctcttcactttgttaattgtttcctttgctgtccagaagctttatggcttgatataatcccatttgtctacttttgctttagtcccctgtgcttttgaggtcttacctgcaaaatctttcccagaccaatgtcctggcgcattcccccaatgttttcttccagtagtttcatactttcaggttgtatattttagtctctaatccattttgatttgatttttgtatatagtgagagataggggtatagtttcattcttctgcatgtggatatccagttttcccacaccatttattgaagagactattctttcaccagtgcgtgttcttggcactttgtcaaaggtgagttggctataaatgtgtggatttatttctgggttttctgtcgtgttccactggcatatatttctggttttatgccagtaccgtgctgtttttgttactacagctttgtagtatagtttcaagtcaagtagtgtcatgcctccagctttgttcattttgctccagattatttagctgtttggagtcttttgtggttccacacaaattttaagattcttttttctatttctgtgaaaaacttcactggcatttggataggtattacattaaatctggtagcattgatattttaacaatattagtttttccagcccattaaaatgggatagataccttttcagttttttgtgtgttcttcaattccctttatcagtattttagttttcattatagagatatctcagctctttggtttaatttattccaatatatttatttttattatagctattgtaaatgatttttaaaaaatttctttttaggttgttagctcttggtatatagaaatgctactgatttttgcatgttggttttgtatcctgcaactttactgaatttgtttatcagttctaatagttttttgatggagtctttagttttttgtgaaatataagattatgtcatctataaacaaggagaatttgacttcttcctttccaatttgggtaccctttatttctttctcttgcttacttgttctggcttggacttccaggactacattttatagaattggtgaaagtgggcatccttatcttgtttcagatcttaaaggaaaggcttttggttttccacatttggtatgatattagccgtagtttgtcatatatggcatttattgttttgaggtaagctttctatacccagtttgtttagagttttctcatgaagggatgttgaatttaatctttttggcatcaattgaaatgatcatttgtttttgtccttcattctgttgatatgatgtatcacattgattcatttccatatgttgaaccatccttgcatccctgggatgaatcccccttgatcatgatgaatgatcttttactgtgttgttgaatttggtttgctagtagttcgttgaggatttttgcatcaatgttcatcagagatattggcctgtagtttctttttgtgtatgtgtgtgtctttgtctggtttggtttcagggtaatactggccttgtggaatcagtttggaagtatttttcccccttgatttttgggatagtttgtgaagagctggtattagttctttttttttattattatacattaagttttagggtacatgtgcacaatgtgcaggttagttacatatgtatacatgtgccatgctggtgtgctgtacccattaactcgtcatttagcattaggtatatcgcctaatgctatccctctccccttcccccaccccacaacagtccccagagtgtgatgttccccttcctgtgtccatgtgttctcattgttcaattcccacctatgagtgagaatatgcagtgtttggttttttgttcttgcgatcgtttactgagaatgatgatttccaatttcatccatgtccctacaaaggacatgaactcatcatttttatggcggcatagtattccatggtgtatatgtgccacattttcttactccagtctatcattgttggacatttgggttggttccaagtctttgctattgtgaatactgccgctataaacatacgtgtgcatgtgtctctatagcagcatgatttatagtcctttgggtatatacccagtaatgggatggctgggtcaaatggtatttctagttctagatccctgaggaatcgccacactgacttccacaatggttgaactagtttacagtcccaccaacattgtaaaagtgttcctatttctccacatcctctccagcacctgttgtttcctgactttttaatgatcgccattctaactggtgtgagatggtatctcactgtggttttgatttgcatttctctgatggccagtgatggtgagcattttttcatgtgttttttggctgcataaatgtcttcttttgtgaagtgtctgttcatgtccttcgcccactttttgatggggttgtttgtttttttcttgtaaatttgtttgagttcattgtagattctggatattagccctttgtcagatgagtaggttgcgaaaattttctcccattttgtaggttgcctgttcactctgatggtagtttcttttgctgtgcagaagctctttagtttaattagttcccatttgtcaattttggcttttgttgccattgcttttggtgttttagacatgaagtccttgcacatgcctatgtcctgaatggtattgcctaggttttcttctagggtttttatggttttaggtctaacgtttaagtctttaatccatcttgaattaattttagtataaggtgtaaggaagggttccagtttcagctttctacatatggctagccagttttcccagcaccatttattaaatagggaatcctttccccactgcttatttttctcaggcttgtcaaagatcaggtagttgtagatgcgtggcgttatttctgagggctctgttctgttccattggtctatatctctgttttggtaccagtaccatgctgttttggttactgtagccttgtagcatagtttgaagtcagggagcgtgatgcctccagctttgttcattaggcttaggattgacttggcgatgcgggctcttttttggtttcatatgaactttaaagtagttttttccaattctgtgaagaaagtcattggtagcttgatggggatggcattgaatctataaattacattgggcagtatggccattttcatgatattgattcttcctacccatgagcatggaatagtcttccatttgtttgtatcctcttttatttccttgagcagtggtttgtagttctccttgaagaggtccttcacatccgttgtaagttgtattcctaggtattttattctctttgaagcaattgtgaatgggagttcgcttatgatttggctctctgtttgcctgttattggtgtataagaatgcttgtgatttttgtacattgattttgtatcctgaggctttgctgaagttgcttatcagcttaaggagattttgggctgagacaatggggttttctagatatacaatcctgacatctgcaaacagggacaatttgacttcctcttttcctaattgaatacactttatttccttctcctgcctaattgccctggccagaacttccaacactatgttgaataggaaaggtgagagaaggcatccctgtcttgtgccagttttcaaagggaatgcttccagtttttgcccattcagtatgatattggctgtgggtttgccatagatagctcttattattttgagatacgtcccatcaataccaaatttattgagagtttttagcatgaagggttgttgaattttgtcaaaggccttttctgcatctattgagataatcatgtggtttttgtctttggttctgtttatatgctggattacatttattgatttgcatatattgaaccagccttgcatcccagggatgaagcccacttgatcatggtggataagctttttgatgtgctgctggattcggtttgccagtattttattgaggatttttgcatcaatgttcatcaaggatattggtctaaaattctcttttttggttttgtctctgcccggctttggtatcaggatgatgctggcctcataaaatgagttcaggaggattccctctttttctattgattggaatagtttcagaaggaatggtaccaattcctccttctacctctggtagaatttggctgtgaatccatctggtcctggactcttttcggttggtaagctattgattattgccacaatttcagagcctgttattggtctattcagagattcaacttcttcctggtttagtcttgggagggtgtatgtgtcgaggaatttatccatttcttctagattttctagtttatttgcgtagaggtgtttgtagtattctctgatggtagtttgtatttctgtgggattggtggtgatatcccctttatcattttttattgcatctatttgattcttctctcttttcttctttattagtcttgctagcggtctatcaattctgttgatcctttcaaaaaaccagctcctggattcattaattttttgaagggttttttgtgtctctatttccttcagttctgctctgattttagttatttcttgccttctgctagcttttgaatgtgtttgctcttgcttttctagttcttttaattgtgatgttagggtgtcaattttggatctttcctgctttctcttgtgggcatttagtgctataaatttccatctacacactgctttgaatgtgtcccagagattctggtatgttgtgtctttgttctcattggtttcaaagaacatctttatttctgccttcatttcgttatgtacccagtagtcattcaggagcaggttgttcagtttccatgtagttgagcggttttgagtgagtttcttaatcctgagttctagtttgattgcactgtggtctgagagacagtttgttataatttctgttgttttacatttgctgaggagagctttacttccaactatgtggtcaattttggaataggtgtggtgtggtgctgaaaaaaatgtatattctgttgatttggggtggagagttctgtggatgtctattaggtccgcttggtgcagagctgagttcaattcctgagtatccttgttaactttctgtctcgttgatctgtctaatgttgacagtggggtgttaaagtctcccattattattgtgtgggagtctaagtctctttgtaggtcactcaggacttgctttatgaaactgggtgctcctgtattgggtgcatatatatttaggatagttagctcttcttgttgaattgatccctttaccattatgtaatggccttctttgtctcttttgatctttgttggtttaaagtctgttctatcagagactaggattgcaacccctgcctttttttgttttccacttgcttggtagatcttcctccatccttttattttgaggctatgtgtgtttctgcacgtgagatgggtttcctgaatacagcacactgatgggtcttgactctttatccaatttgccagtctgtgtcttttaattggagcatttagtccatttacatttaaagttaatattgttatgtgtgaatttgatcttgtcattttgatgttagctggttattttgctcgttagttgattcagtttcttcctagcattgatggtctttacaatttggcatgattttgcagtggctggtactggttgctcctttccatgtttagtgcttccttcagaagctctcttaggtcaggcctggtggtgacaaaatctctcagcatttgcttgtctgtaaaggattttatttctccttcacttatgaagcttagtttggctggatatgaaattctgggttgaaaattcttttctttaagaatgttgaatgttggcccccactctcttctggcttgtagagtttctgccgaaagatcagctgttagtctgatgggcttccctttgtgggtaacccgacctttctgtctggctgtccttaacattttttccttcatttcaactttggtgaatctgacaattatatgtcttggagttgctcttctcaaggagtatctttgtggcattctctgtatttcctgaatttgaatgttggcctgccttgctagatttggcaagttctcttggataataccctgcagagtgttttccaacttggttccattctccccatcactttcaggtacaccaatcagttgtagatttggtcttttcacatagtcccgtatttcttggaggcttcgtttgtttctttttattcttttttctctaaacttatcttcacacttcattttattcatttcatcttccattgctgataccctttcttccagttgatcgcattggttactgaggcttgtgcattcatcacatagttctcgtgccgtggttttcagctccatcaggtcctttaaccacttctctgcattggttattctagttgtccattcgtctaattttttttcaaagtttataacttctttgccattggttcgaacttcttcctttagctcggagtagtttgatcttctgaagccttcctctctcaactcatcaaagtcattctccatccagctttgttccattgctggtgaggagctgcattcctttggaggaggggaggtgctctgattcttagagtttttggtttttctgctctgttttttccccatctttgtggttttatctacctttggtctttgatgatggtgacgtacagatgggttttcggtgtggatgtcctttctgtttgttagttttccttctaacagtcaggaccctcagctgcaggtctgttggagtttgctggaggtccactccagaccctgtttgcctgggtatcagcagcagaggctgcagaacagcagatattggtgaactgcaaatgctgctgcctgatcattcctctggaagttttgtctcagaggagtagctggccatgtgaggtgtcagtctgcccctactggggggtgcctcccagttaggctactcaggattcagggacccacttgaggaggcagtctgcccgttctcagatctcaagctgcgtgctgggagaaccactactctcttcaaagctgtcagacagggacatttaagtctgcagaggttattgctgtcttttgtttgtctgtgccctgcccgcagaggtggagcctacagaggcaggcaggcctccttgagctgtggggggctccacccagttcgagcttcccggccgctttgtttacctactcaagcctgagcaatggcgggcacccatcccccagccttgctgccaccttgcagtttgatctcagactgctgtgctagcaatgagcaaggctccatgggcgtaggaccctctgagccaggtgcaggatataatctcctggtgtgccgtttgttaagcccgttggaagagcgcagtattagggtgggagtgacccgattttccaggtgccatctgtcacccctttctttgactaggaaagggaattccctgaccccttgtgcttcctgggtgaggcgatgcctcgccctgcttcggctcacgcacagtgcactgcacccactgtcctgcacccactgtccggcactccccagtaagatgaacccggtacctcagttggaaatgcagaaatcacccgtcttctgcatcacttatgctgggagctgtagactggagctgttcctattcggccatcttggctcccaatgcaaagaccttcaaacaacgtgacttcattttctcactcctaccttttgtgctcttgtcatttatttgaattctacatatattttaaaccccataagacattattattgttttatataatcaatatcatttatatatatatatatatttacacctttcatttctttcattcttttctgcatttcttgcttccatctatgatcattttctttttgtctgaagaaacttctttggaacttccttcagtgtgtgttggctagtaaaaagttctctgtcagtttttggtcagaatgggtctttattttgcctagatacaagtccttggttggatttacatattgtgaatgttttctcccagtctgtggtttgtcttttcactcctttaagggtgcattatggttaatagaagttcttacatttaattaattcttatttttcagttttttatggttaatgccttttgtattctgtttcagaaatttttgcctatcctaagaacatgatgccatccttctatattttctttctacatattttaaatattttcttctagaagtctgattgctgtgttgttcacaattaagtttatgattcatttttaattaattttgatggagtgatgcagataaaagttcatttttccatatggatatttaattgctctagcaccaattgttggaaaaaaataatttcctcactgaattgcactgttgtctttgccatgaatctgatgactgtatcactgtagctttgtttctgtactctatttcaggggtaggttatgatccacaagccaaatttgcagcttgtttttatatggcattgagctaagaatttttttacatttttaaagaattgtcacacaaaacaaaaaaaaagcaaaaaaacaaataaggatatgtatcatggaccatatgtgtctacaaacctaaaatatttactatgttgctttttacagaaaaagtttgccaacccctgatctcttatattccattgacttattggtctatctttgtaccagtaacatactatcttatagtaagttttaatatttgttagtataattcctccaactttgctctctttgatttttatataaattttagaatcatcttgtcaattttatcaataaaaatatcttctgaggttttgatagggattacattgattctgcagatcaatttgggggagcatacctcttgacaatattgagtattcctgtccatgagcatggtttagttatttatttacatcttttaaattttctcttggcaatgtttttgtaaaattttagtgtacaggtcttgcacatttttgtaaagtgtattctttggtatttaatgctattataatattttttatggtatcagtttttgtcaattgtgtttttctagaaatatgtccctttcatctaagttgtttaatttacttgaagtaagttatttgtaatgttcttttatcatccttataatgtctgtactgatgtctccgttttcatacctgatattgttatttatattttatctattttaagtttatcgcctgcacccactaactcgtcatctagcattaggtatatctcccaatgatatccctcgcccctccccctagtgcacatgtaccctaaaacttaaagtataataaaaaaaaaaagtttgtcgcctttgttataggttcatcaaatttactaatcctaccataggatcaaatttttgctttgttcatcaggtcatggaattaaaaaaatttttttgttttgtttattttctatgttgaatttttatttttattttgctttgcatttcatttatttctggtcttttgttattattccaatactttctctggattcagttttctttttcttcttgacttcttgagattaaaacttggttcattgattttcaacatttcttactttttaaaagttcatacaaagcataaatttccctttatatactgctttaaccccatatcacaaattttgatgagtcatatttttattatcattgagtttaaaatattttataaattttacgttatttcttgttttattcatagttattttacagtgttttacttaatttcccaatatatggcgattttctggctctctctctgttgctgatttatttgttttactgtgatcacataacatactctatattatttcaatcatttgaaatttgttgagacttgctatatgcccagtgaataatttaatttgattaatggcccactgcatttgaaacaaatatgtctttgctgttattgggtagagtgtcatatatttgcctattatgtcaagttgctttatcatgtttttaaaatccttataaacttcctgatattttatctgtttcttacagacatggaggaaactgtgacatctctgtgattgttgagtttgttattttgatttttgtatttgttagtaagaatgtttcaaaataaatgaggcaatataaaatcaggtgcttacaactttaaggttgtattcttattaaatcaattctttcatctttgtgaaatgtcctttttgtctgaagtagtacttgttgccttaaacgtctgcattgtctaaaatttatacacctgcactatcatatttattttgcttaatgtttgtgtggtatatatttcccattcttttcttttcaacctatctctatccttatatttacagtgtgtcttttttaacattttctgtagtgcaagtctgttggttaattaattttgtcagtttttgcttctctgaaaagtctttatttctgtttttgaattatatcttcactgtgtatagaattctgggtttgtggttgttgtttttgttttattacattttgttttattggtttttccctcagcactttaaaaatgccgctccattgtttctacttgcatagtttttcacaataagtttgttgtaattcccatttgcattcaactgtacataatgtatctttttaaaaaaatctggatggcttcaagctctttactttgatttttgtgtgtgtgtgtgtgtgtgtgtgtgtgtgtgtgtgtgtgtgttactttggcattctctaggcttattcaatctgtaatttggtatcattaattttgaaaaatatttatcatctgtgtcttcaaatattgcttctaattctttctcttcttctggtattgcatttacatatattatactgttcaattttgtcacacagctcttgaatatgctgttctagtttgttttctaactatttttccttctagttgttcagttttgttgacatttattgacctatttttacttcagtaattgtttcctgggttgttgagttaattgatgaactcatagatgacatacaatttatctttttattcttgtgtcacttgtgcttttgatgtcacatctaggaaggctttgtctagcccaaggccacatttacttccatattttcttctaagagtttgatagttgtagctgttacatatatgtctatgatctagtttgaataaatttttgtgtatggtgtgaagaagaggtctaacctcttttttattttttgcatgtaaacatccagttgtcccggcaccatttgttgaaaatatgattcttttcccattaagtcatcttgacacccttgttgaaaatcaattgaccataaatgtgagagtttatttctgaactctccattctgttccattgacccatacgtcttctataaattcttatagctaattctacattagactttggtttttcagatgtggtcatctcattagattatggtgatatgtttggttacaagttttatcttctccttggcaacattttttttattactgctcttcttttattcgtttttgttgttcctttctctttttgtgagacagggtctcactctgttgcccagggtggagtaagtggtgtgatcatggctcactgcagcctcaacctcctgggctcaagcaatcctcccacctcagcctcccaagtagtgggactacaggcatgcaccatcatgccaggctaacttttttattttttgtagagacagggtcttgctttgttgcccaggctggtcttgaactccaagctcaagcaatcctccaacctcagcttcccaaagtgctgggattaccagtatgagccactgcacctggccttgttgttcctttcttccttttatcttgtagtatcttgatcctttttgcttattatttatcattgaggtgagtttgttctaaataaacttttcgcagaaagtttatgtagatatattaatatcaatgaggcattaggagtgagttttagattagcaggaattctcttatgaaaggtattgattgtatgtgtgagttttcagcctttacttctctccagcccatcaagatcaaagctgcagagttgtttacatttcagaatttctttcctcccctccccaccttgcaaaacagacttacagtgcaaaaatgacttgtcaatgtgattctttcttctggtcccatctttcctaccttttgagacttgtgttgaaaggagtccagtaaaaccaccgatgctagcttgtataccctgatcccattgttataatgaatgactgactgtttttcatatcaaagtataatacttgcaccttgatagaagaaagaaacaaggccaggcacagtggttcatgcctgtaatcccagcactttgggaggctgaagtaggaggaataattagactttgatattaaaaatggggaagatatggcggtataagatatgaggaagtatgtcttcttggacttttctgaaatctgccagccatgagcatccactctttttatcttttgatacctgttttatattaactatacttctattttgtggtttcatggcttcagatatcttccagcttaattgtactctgtctttaattatttgcagcaatttctgaaaggagcaagaagaaaggccagccctttcttcactaccttaaaaactggtcatcttttgaaaccccatgaaaggcacagtgggtgaccatctacatcaggagtgggcaaactatggcccttgggtagtctggtctctgtccgtttttgtaaggttttattggaacccatacacacacaaactgatcatctcttgttatgtgttaagttttcttataattattcttttctatttcatccagctgaattaccatttcaccttgtgtatgccctttccagtcttaaattatagaagctatgtctttgtggttttaaattatggaagctgtgccttcttgtgttttagtatggcaagatatttgttcttacttttcctctagaatctgcagtggattactttcagaagtaggtattgcctctaagtttcctgacttctgtttccttctccctgttctgtagtatatttatagattgcatgttttctcgtccttaaacaaggtacaaatatgttctgatcaaggtttgctagccgagaggataagtggcttgctcttagcctaactctctgtctacttaatggatgtcgaattcccttctcaactcaacagctagtaactagttccaagatcggataatagcttacagaattaattagttcagtgaaagccctggtttgatcacagaggcaggagactgatctatatatttgtagtgctgactagaccccaacttggccagatagcttatacctatgtcagaagttggaggaggagattgacagctgaggtgtctccaagggaattacaattattttcattttctttgtgtctgtaattatgtctcttttcttacttcaaattttgtatatgtgaaatttcttaatttttatttggttatttattttattgactttttcatcaaacaaccaactctaagttcttggattgaaatttatgaattaattataatgttttaaatttaccattagtcacacatacaatacaaaaagatattttcattacaaaattttaacccaagccattaaaactaaactccagcttggtcaccattcctaataccaggcccctctcagaggggagggtaaataaaagtccattttggtaactagtttgacgagaatctctaattgtttccctgtttttcttataatgtctgcctttgaattatcctctttttttcaagagttccatcatataatgtattcctttttgcttacagattgacctcctagaggcatgcatccccctgctccagtctgagctggttctctctaggcctgaggctcagttatcaacttgggacttttatttaccctccctcaggataggtacctggttcttggataccaggtcttactcttgtttgagatactcctttattttggtggcaaacattccataatcacttcctgataatggtgacatttgaggtagattttctgagtctttatatgttagaatatgtttttattctcctttgccacttgattgataatttggctgcacatagaatgtaagcattcacagggcttttgggagcagcttcccttgagaagaaggtggatgcagttaagatcttccctgaaaagactgtgtgaaatgacaaggctattgaggtacccaacgggtagcttggtaaaggtgtatcttgtctcttatgtttatgcatctactttaccaccatgtaattagcctattataacttgttgcattccttcactcagctaatcttgttcatggtagaaattaatattgctagtaccatggtagaattttatattagctggatcctagacctaaatgctccttccttgtgcttacatattctgcaagtgggtgacagtggatgctaggtattgtgttatgtgatttcaatgtattatatgatggggtagatactattagcctcatttgaaaattagaaacctattgttcagaaagtttaagtgactttctcaaagtcacacagctggtaaatggtagaactgggatttgaatccaggcaatctgatggatttaagaggaacctgtgccactatgtgatatagcaataacatctagccaatataaatactttcctgaattaaatcactgtcatattcagagagttctgtgtcactattaagaccctccattattgtgtatattaattacatttccctattttaatcccaatatctattcatttttatcacagtcctttcttatggtcacaaacaggcatagtacaacagcagcaatgcaaaaaccacttttatattacatgttccagggatttaacccaatgacctgtgatataatgatactgactagtattttttcatttatctgggaatgggagagaacctctaacagaacgttttagaatctgtgttatgagtaaccagagtcttattcttcctcatctccaggtctatggattctggggtgccacaactcagactttcggaacagaggcatgaccgccttactgaaggtttctagttgtgacaagaacactggtgattattacgaggacagttatgaagatatttcagcatacttgctgagtaaaaacaatgccattgaaccaagaagcttctcccagaattcaagacaccctagcactaggcaaaagcaatttaatgccaccacaattccagaaaatgacatagagaagactgacccttggtttgcacacagaacacctatgcctaaaatacaaaatgtctcctctagtgatttgttgatgctcttgcgacagagtcctactccacatgggctatccttatctgatctccaagaagccaaatatgagactttttctgatgatccatcacctggagcaatagacagtaataacagcctgtctgaaatgacacacttcaggccacagctccatcacagtggggacatggtatttacccctgagtcaggcctccaattaagattaaatgagaaactggggacaactgcagcaacagagttgaagaaacttgatttcaaagtttctagtacatcaaataatctgatttcaacaattccatcagacaatttggcagcaggtactgataatacaagttccttaggacccccaagtatgccagttcattatgatagtcaattagataccactctatttggcaaaaagtcatctccccttactgagtctggtggacctctgagcttgagtgaagaaaataatgattcaaagttgttagaatcaggtttaatgaatagccaagaaagttcatggggaaaaaatgtatcgtcaacagagagtggtaggttatttaaagggaaaagagctcatggacctgctttgttgactaaagataatgccttattcaaagttagcatctctttgttaaagacaaacaaaacttccaataattcagcaactaatagaaagactcacattgatggcccatcattattaattgagaatagtccatcagtctggcaaaatatattagaaagtgacactgagtttaaaaaagtgacacctttgattcatgacagaatgcttatggacaaaaatgctacagctttgaggctaaatcatatgtcaaataaaactacttcatcaaaaaacatggaaatggtccaacagaaaaaagagggccccattccaccagatgcacaaaatccagatatgtcgttctttaagatgctattcttgccagaatcagcaaggtggatacaaaggactcatggaaagaactctctgaactctgggcaaggccccagtccaaagcaattagtatccttaggaccagaaaaatctgtggaaggtcagaatttcttgtctgagaaaaacaaagtggtagtaggaaagggtgaatttacaaaggacgtaggactcaaagagatggtttttccaagcagcagaaacctatttcttactaacttggataatttacatgaaaataatacacacaatcaagaaaaaaaaattcaggaagaaatagaaaagaaggaaacattaatccaagagaatgtagttttgcctcagatacatacagtgactggcactaagaatttcatgaagaaccttttcttactgagcactaggcaaaatgtagaaggttcatatgagggggcatatgctccagtacttcaagattttaggtcattaaatgattcaacaaatagaacaaagaaacacacagctcatttctcaaaaaaaggggaggaagaaaacttggaaggcttgggaaatcaaaccaagcaaattgtagagaaatatgcatgcaccacaaggatatctcctaatacaagccagcagaattttgtcacgcaacgtagtaagagagctttgaaacaattcagactcccactagaagaaacagaacttgaaaaaaggataattgtggatgacacctcaacccagtggtccaaaaacatgaaacatttgaccccgagcaccctcacacagatagactacaatgagaaggagaaaggggccattactcagtctcccttatcagattgccttacgaggagtcatagcatccctcaagcaaatagatctccattacccattgcaaaggtatcatcatttccatctattagacctatatatctgaccagggtcctattccaagacaactcttctcatcttccagcagcatcttatagaaagaaagattctggggtccaagaaagcagtcatttcttacaaggagccaaaaaaaataacctttctttagccattctaaccttggagatgactggtgatcaaagagaggttggctccctggggacaagtgccacaaattcagtcacatacaagaaagttgagaacactgttctcccgaaaccagacttgcccaaaacatctggcaaagttgaattgcttccaaaagttcacatttatcagaaggacctattccctacggaaactagcaatgggtctcctggccatctggatctcgtggaagggagccttcttcagggaacagagggagcgattaagtggaatgaagcaaacagacctggaaaagttccctttctgagagtagcaacagaaagctctgcaaagactccctccaagctattggatcctcttgcttgggataaccactatggtactcagataccaaaagaagagtggaaatcccaagagaagtcaccagaaaaaacagcttttaagaaaaaggataccattttgtccctgaacgcttgtgaaagcaatcatgcaatagcagcaataaatgagggacaaaataagcccgaaatagaagtcacctgggcaaagcaaggtaggactgaaaggctgtgctctcaaaacccaccagtcttgaaacgccatcaacgggaaataactcgtactactcttcagtcagatcaagaggaaattgactatgatgataccatatcagttgaaatgaagaaggaagattttgacatttatgatgaggatgaaaatcagagcccccgcagctttcaaaagaaaacacgacactattttattgctgcagtggagaggctctgggattatgggatgagtagctccccacatgttctaagaaacaggtatgaatgcattggttattcctttgctctgctcttgtgacatttgactttaccagatgatgacaccaacaatgagagttagaggatgaaaaatcaaggtgtcttgaaactcttactctggtgagatagagagaagagaggtttacaagagggtagaggaatcagggacaagaaggagcaatggggagcaggaagaaagtcaacctcacctatcaaccttatgagctgcaggggaaatcttagtctcatcagagaactttaagcaaggcagaaggaagaagcaagttcgtgttaaagaggttaaggacttggggaggattggttttcatgatactggggatccagagggcaaagtaggatgattttatttttaggtgagtagagggaggttgagcagtcaagtagtacagagaaatgtggaatataaacataaggagagtcagtcagtcacaaatatttatggaacacctactacatgccagacacttttgtacacattggagtgcagcacagcaggagcttatattctattggaaagagcaagagacaagttagtacaaaactaaataaggcaatctcaattgtgttgttcagaagatagaatagaataatatggtagagagaataatatgatagagtaatacggtagagtgttacattagctgtggtggtcatagaaatcatctttgaggagttgagacctaaatgatgataacaggccagctgatggagctctgagagaagatgtttccagacagagggaagagaaaatgcaaaggccctgagaatggaaaaagtttaccatgtttgaggaacaagaagggacaagcatgacttgtcactttcccaccttgctttctagctcaagtaagcccttattgctgcattgcaaccatagactatttccctagtccactgactttctcattctcctggacctctatcttagattttctgtgttttccttaaatctcgagcaccttttttccattctccaatgcccattttcactcttagctgatgctgtgcaatgaacctccacagactcccaacatcacatttactggcatttgtacccatatactctgcctgcacacttattacaataaatagagtgtctgtgctcctaaggccaacctctccagttttgtacttgattcccatctcttctcccttcataaaaaatgttgctccagcaatttctccttttctcccttacatcatcaatttatctctccactagattaatctcatcaacatcaatcatgctattatttcctcccctatctttacagaaaccgtcttaaaataattgtccctgcttgcagcctttgcatcttttcctgccattctctcctctttaacccactccaaagaagcttttatctctattatttcataagaactacattttcaaggtcattattgatctttacattactgattactagccctcatcttatttgaattctcagtagtatttgagaggtgattactccatcgttgatacaggttctcacttggtttctctaacaccacttttcttcacttttctactaaacttactgccaatctttgtcaactttgcgagtccttcttcatccccctaatctttaaaggttagagtgctccagggattagttctccaacttcttctttattctatttatactcactctgtgacgacattgtttagcctcatgattttaagtactatctatctgcagataattccagttgaatatctggagatattctcagatctctctcctgaagtcaaaatttacatatcaactccctaccttaacatgcacacaattagactcttaattcctgccccttcccaaaacctgctgattgctcagccttctccatggcaatcaaaaaccattcctggccgggcatggtggctcactcctgtaaccccagcacttggggaagctgaggcaggtggattggttgagccccagagttcaagatcagcctgggcaacatggcaaaacctcatctctattaaaaatacaaaaattagccaggcgtggtggtgcacacctgcagtcccagctactcaggaggctgaggcacgagaatcgcttgaactggggagacggaggttgcagtgagctgagatggcctcactgcactccagcctgggcaacagagtcagacttgatctcaaaaaaataaataagtaaaaccattccctatttcagttattcagtcacagatcttgaagttttccaactctttttttcttacattaacatctaatctgtaaaggatcctgtattagtccattttcacactgctaataaagacatacctgagactgggcaatttacaaaagaaagaagtttaatggactcacagttccacatggctggggaggcctcacaatcatggcagaaggcagggaggagcaagttatatctcacatggatggcacaggcaaagagagagagcttgtgcagggaaactcctctttttaaaaccatcagatcttgtgagacttattcactatcatgagaacagcaagggaaggacctactgccatgattcagttacctcctatcaggtccctcccacagaacatgggaattcaagatgagatttgggtagggacacagccaaaccatatcattccaccccatcccctcccaaatctcgtgtcctcacatttcaaaaccaatcatgccttcccaacagtcccccaaagtcataacacatttcagcattaactcaaaagtccacagtccaatgtctcatctaagacaaggcaagtcccttccacctatgagcatgtaaagtcaaaagcaagttagttacttcctagatacaatggggtataggcattgggtaaatacagccattccaaatgggagaaattggccaaaacaaagggcctacaggccccatgcaagtctgaaattctacggggcagtcaaatcttaaatctctaaagtgatctcctttgactccatgtcttgcatctgagtcatgctgatgcaagaggtgggtgcccatggtcttgggcagctccacccctgtggctttgcagggtacagcctcccttgtgtctgccttcatgggctggcattttctgtagcttttccagatgctggtgcaagtttctgatggatctaccattccggggtctggaggacggtggccctcttctcacagctccactaggtggtaccccagtagggactctgtgtgggtgccctgagcccacatttcccttctgcactgccctagcagagtttctacatgaaggcccacccccgcagcaaacttctgcctgggcatccaggcacttccattaatttctaaacaacaaagcattcaagaggcgacttgggtgctattaagggcattcagtttcataagggaagcagagcataaaagtttggaaaatttgcagcctgataatgttagagaaaagcaaatcccattttctgaggagaaattcaagcaggctgcagaaatttgcataagtaatgaggagccgaatgttaatccccaagacaatggggaaaatgtctccagggcatgtcagaggtcttcacaccagcccctcccatcaccggcccagaggcctaagaggaaaaagttgtttcatgggctgggcccaggatccccatgctgtgtgcagcctagggagtcggtgccttgtgtcccagccgctacagccatggctgaaaggggtcaatgtagagctcaggctgtggcttcatagggtacaagtcccaagccttggcagcttccacatgatgttgagcctgcgagtgcacagaagtcaagaactggggtttgggaacttccgcctagatttcagaagatgtatgaaaacacctggatgcctaggcagaagtttgctgcgggggtgggccctcatggagaacctctgctagggcagtgcagaagggaaatgtgggctcagagcacacacacagagtccctgctggggtaccacctagtggagctgtgagaagaggaccaccgtcctccaggccccagaatggtagataccctaaatcatctctttcaaattcgaagttccacaaatctctaggacaggagcaaaatgccaccagtatctttgctaaaacataacaagagttacctttgctccagttcccaacaagttcctcatctctatctgagaccacctcagcctggatttcattgtccatatcattatcagccttttggtcaaagccattcaacaagtctctagagagttccaaactttccacattttcctgtcgtcttctgagccctccaaactgttccaacctctgcctgttacccagttccaaagtcgcttccacatttttgggtatcttttcagcagcaccccactctactggtaccaacttactgtattagtctgttctcacactgctgataaagatatacctgagactgggaaatttacaaaggaaagaggttttatggacttactgttccacatggctggggaggcctcaaaatcatggcagaaggcaaggaggagcaagtcttgtcttacatggatggcagcaggcaaagaaagaaagcttgtgcaggaaaactcttttttttcttttcttctttttagacagagtcttgctctgtcacgcaggctggagtcagtggcgtgatcttggctcactgcaacctccacctcccgggttcaagtgattctcctgcctcagccttccaagtagctggtactacaggcatgtgccaccacatgagatgagattttggtagggacacagccaaaccatatcattccccctgtcccctcccaaatctcatgtcctcacatttcaaaaccaatcatgccttcccaacagtcccccaaagtcataactcatttcagcattaactcaaaagtccacagtatttttagtagagatggggtttcaccatattggccagactggtctctaactcctgaccttatgatccgcccgccttggcctcccaaagcactgggattacaggtgtgagccaccatgcccagccaaaaactcttctttttaaaaccatcagttctcatgagacttattcactatcacaagaacagcataggaaagatctgcccccatgattcaattacctcccaccaggtccctcccacaacacatgggaattcacgatgagatttgggtggggatcctcttggctatcatttcaaaaaatagtcagggttgattatggacttagtattgaataagatgaaaatgtactgaaatggaacgatgaagataattgaccagggaaagcaggttacaagccaagagaggatacagtgtcacttcagatgctataaaagtgatgtttttattttttgaatgttatttggctatattttcaaattatctgcactgcatatgcactgcttctgtaataataaaagggtattaaaataataaaatcaagtctataaatcacacacacacaccccagcctcttctctacacctcagtgactaccaaccacatctaaattatcatcatttctcatctgaattattgcaagaagccattgcaataattcagatgagagttgatacaaagccttcctgtttccaaccttaccctcatatagtcttttcccaacattgcatctaaagtaatttttcaaattgcaattctgatcactgttctctgcttcagatcctccagtggattttcatctcactcagtaaattccaaagccttcaccatggccttcaagaccctacgaaatttgaccctctgcaacctctctgccttcatctgttaccattgtctcctgttaatcctgcctcagccacactgacctccttgttcttctcaaatggactagatgtgtgcctatctctagaccattacagtttctgttctctctacttaaaattatgtccctgatactctaatgcaagttctcttacttccttcaggacgctgctcaaatttcattttatcagtgaggctttccctgaacactgtatgtaaatattgctcccaccattttttttcaatgcacttaacagtgcctgaaatattatatatttatttctttattgtctatcttctctgactataagttaagctcattaagaacacaaactttggaggtattgttcaatgttgtgtccccagaactttgaacagtgcctggcacgtggcagatgttcaaataaatgtatgttgaatgaattagaaaatgataaatgtagggagacaaaagcaggtctcccatttatatccaaactctaggactctaggaaagactgattatatggaatcgtgtcacacagcatccatgggcaagagtggaggcagagataccagttaagatgctattgcagtcatacagataaaagaagacagttatttagaccagtgtggtggtgacagaaatggaaagaaatggaaggatgttgggtataattaaagataagcatataagactggctgttaattgagtatgggaagaatgaggagagaggatgtaaagaacatttctttttgtttgtttgttttgttttgtttttgtttctttttattatactttaagttctagggtacgtgtgcacaacctgcaggtttgttacatatgtatacatgtgccatgttggtgtgctgcgcccattaactcatcatttacattaggtatatctcctaatgctatccctccctcttccccccaccccccaacaggccccggtgtgtgatgttcccctacctgtgtccaagtgttctcattgttcaattcccacctatgagtgagaacatacagtgtttggttttttgtccttgcgatagtttgctgagaatgatggtttccagcttcatccatgtccctacaaaggacatgaactcatccttttttagggctgcatagtattccatggtgtatatgtgccacattttcttaatccagtctatcattgatggacatttgggttggttccaagtctttgctattgtgaatagtgccgcaataaatatacgtgtgcatgtgtctttatagcagcatgatttatagtcctttgggtatatacccagtaatgggatggctgggtcaaatggcatttctagttctagatccctgaggaattgccacactgacttccacaatggttgaactagtttacagtcccaccaacagtgtaaaagtgttcctatttctccacatcctctccagcacgtgttgtttcctgactttttaatgatcgccattctaactggtgtgagatggtatctcactgtggttttgatttgcatttctctgatggccagtgatgatgagcatattttcatgtgtcttttggctgcataaatgtcttcttttgagaagtgtctgttcatatcctttgtataagattattagtggatttctcagaagaaatattgtagaccagaagggagtgaaaatatagatttaaaatcctgaaaggaaataaaaactagcaatgaaaaatactatatccagtaattttatctttcagaaatgaaggggtgataaagattttctcagaaagacaaaagctagatctgctttataagaaatgctagtaggagttcttcaagctgaagaaagaggatgcttattagtaatatgaaaacatatgaaaggataaaactcactagtaaaaataagtacattgtcaaatccaaaacactctagtagtgtaatggcagtgggtaaattaattatatctttagtataaaagataaaagacaaagaaagctattttaaaaactaaagctataataatgtgttaaggaatgcaaattattaaaatatgtaaactgtcacatcaaaaacataaaataggctgggcacagtggctcatggctgtaatcccaacactttgtgggggccaaggtgggaggatcacttgagcccaggcatttgagactaacttgggcaggatagtgagatctcatctctataaaaaatttaaaaattagtaaagcatggtggtgcatgcctgtagtcccagctactcaggaggtggaggtgggaggactgcttgagcctgggggggtcaaggctacagtaagcaatgatcacaccactacactccagcctgggcaacagagcaagaccctgtctcaaaaaaaataataatatgtaggaggaagggaataaaagtgtagagtttgtggatgcaataaaaattaagttgttatcagtttaaaatagcctgctaattttgtgtaagcctcatagtaaccacagagcaaaagcctatagtagatacacaaaacattttaaaaaggtccaaagcataccactacagaaagccatcaaactataaaggaagaatgcaacagaagaagaaaggatcaaaggatctaaaaaaaaaaaaagaaagaaagcaattaacaaaatgacacaagtatgaccaaagtccactgcttctttattactgatatagaatatctttcagatcttaagggactgattaattacttgggagagaaagtttgtgttgagaagatttgcttgtgttgcaatgagaaggggaagttctactcaacagaagctgtacaggcacatatgacaaaagctggtgtaagctttttacagatggtgatgctgctttggaatttgcagacttgtatgagtttaggagtagctacccagatcacaaggaaggggaggaccctaatgaggctgaggagtcgcccttaggaaaggacttagaatatgatgatgaaagcatggaactgattctgccttctgatgccagagtgggtcatcactccttgatgagatactacaaacagtgatttggcttgtcaagagctgtggtagttgctaaatattgtgaggccatgggccgagtgcttcagtaatagagagccctgggatagactggcaacacaggagcagctgttacatgaaagtgagacatgcattatatccaaaggatgaagtcaaaatggatgctgaagacagaaatgaagaacaatgccaccaagcagatgcactttagggtccaagtgagattctgagagtctgccaggattgagtgattgtctgctgcccaagtttcctccttgccctgaggaccagggaaagccagattgtatgatggacacttttgctgctacttcacttgctctaacataataataaaaatgaaaatctaaaaaatattttattgaagaatgaaggtgaaagaaatacattttcagacaagcataaacagagaaacttcaccattagcaaaagtccactaaaatattctaatgttatacttgagacaataaaaaagtgatacagaatggaaggcatgagagacaagatgggataaagagcaaacaaagttaaatatgtggataaatagagataagtatcataaaacatggtcaaatgttttatgagcgttaagatatatagaattgctttattcacagttggtttgctgtcataacacaagtatcatgaaaatcactgctaaatctaagccaaaattgggaaaggaaaaggttcatgtcactatcatcaacgttggacatgtagactcaggaaagttcaacactactggtcatctgatctataaatgtgatgtgatcaacaaaggaaccattgaaaaatttgagaaagaacctgctgagatgggaaagggctcatttgagtatgcttgggtcttggataactataaactgaacatgaatggaatatcaccattgatatctcctaaagaaacctgaggccaaaaatatcctgtgaccatcattgatgccccagcacacaggggctttattaaaaaaaaaaaaaaaaaaaaaaacatgattagagtgatatcaccaaaatggtggatagaagcaatctggcttcactctcctccagaaaaaccaaaaacaactattcagtgtctagcttatcaccaggaatatcccataactcaaaacagaggctgtgaggatctgagtggccacatagaagagaaaaactgcaagcagaagataacaaaaatgggcctgtttaactgcagcatccccttcccaagctgccaggcaccatgcagaaaagttcccccagactgacagtatgtacatcagaaaaagtgacatctagatgaagagccagctttcccaccatcttgggttcctttgcagaaaaatcattcctgcctcaatccgtgggaagcagcctgattgcctctagggtaaaaaaatcctgagggcagctagagacaaaggatggaggcggggctagcaaccccagcatgcaaaacacattggctgctcttcatctaagccaaagaagacaccaaatgagagagaatgttcagcccgtggttcctctggacacaaaatcctaaccagatgtctcacccaaccaggatatccagtttgggacctcccccaaatcgggaataggcagtaatccaagccgttgcaagagctgcagcaaatctgggcttacagcaccatctagtgccaaaaaagaggcagtaatctcagagtaaggaagctctaattcatacataacctttagacaggcatactcctgaaaaaccaaactaagccagacacaaagactggaataaataacttagcattcatacaaagacatagatatatgtgcataaaaaacaagagcaaatagggagctatgacctctccaaatggaaacagcatggagccagtgaccaaccctaatgagatggcaaattgtagctctcaaatcaataattcaaaataaaagttctgaggaaactcaaagaacacaaaaaagcaactgagaaatttatgagataaatttaacagagaaatcaaaataataatttaaaaaaccagaaatgctggagctgagaaatacaactgaacggaaaaaaaaaatgcactggaaagtctaaacagcggaactgatcaagcaaaacgaacaatcaatgagctcaaagacaggctatttgaaaatacacagtcaaaggacaaaaaataattaaaaggaatgaagaacacttgcaagatctagaggactgcctcagtagaacaaatctaagagtcatgggccttcaagagagaaagagcaatgaataaaaagctcaaagaaataacagaaaatatttccaaacctacagagagatgtaagtatccagttataggaaggctgaagatcaccaaacagattcaacccaaataagactaccccaaggcatacaataattaaactctcaaaggtcaaagacaaagaggggatcctaaaaagagcaagaaaaaagaagcaaataacatataaaggagctccagttcatccgggaatatactctggaccagatgaacctacctgacattttacagaacattttatccaactactacagaatatacattcttcttatcagcacatggaacattctccaggatagactatatattaggccagaaaacaagtctcaacatttaaaaaaataaaattatattaagtatcttttctgactacagtagaataaaactagaaatcaatgacaagaggaacgtttgaaactatacaaatacatggaaattaaacaacatgctcctgaacaaccaataagtcaatgaagaaattaagaaggaaatttattgaaacaaatgaaaatggaaacaacataccaaaatgaatgggatacaacaaaagcggtactaagagagaagtttatagctataaatgcctacatcaaaaaagaaagactcaaataaacctggtaatgatgtaactcaaggacatagaaaaacaagagcaaaccaaacccaaaattagtagaaggaaaataataataataatcatagaaataaataatattgagaaaaagaaaacaatatgaaagaccaatgaaatttttaaaatggctttttgaaagataaaatttaaaatctttagctagactaaggaaaaaaaatgagagaagacccaaataattgaaatcaaagatgaaaagagtcattaaaactgataacacaaaaatacaaagtttcactagaaactattatgatcaactatatgccaacaaactggaaaaactagaagaaatggataaatttctggacacatacaacttaccaagattgaactatgaggaaatagaaaacttgagcagaccaataactagtaatgagattgaagcagtagtaaaaagtctggcattaaataaaagtccaggacctgatgacttcactgctgaagaaaaacttacaccaattatactgaaactatttaatattgcaaaaaattgaagagaaaagaatgtttccaaactcattctacaagaccagcattatcccaatacccaaaccagacaaagacacaacaacagcaaaaagaaaactacaggccaacttcgctgatgaatatagatgcaaaaatcctcaacaaagtactagcaaactaaattcaacaacacattaaaatgagtatttgtcatgcccaagggggattcatcctaggaacacaaagatagttcaacatatggaaatcaataaatgtgatacaccacattaacagaaggaaagacaaaaaccatatatttatttcaataaatgtcaagaaagcattgaataaaattcaacatcccttcatgataaaaactctcaacaaatttggtttaaaggagcatacctcaaaacagtaaatgttatatatgacaagcccacagctaacattacaccaaatgggaaaaaattgaaagcctttcctctaagatctggaacaagacaagcatgcccactttcatcaattctattaaatgcagtcctggaagtccaagatggagcaattaagcaaagggccttcaaattagaaaaaaagaaatcaaattccccttgtttgtagacgatataatgttatatttagaaaaacctaaacactccaccaaaaaactgttagaactgatcaacaaattcagtagagttgcaagaagcaaaaccaacatacaaaaatcagtagcatttctatataccaagagctaacaatccgagagagaaatcataaaagcattttcattttcaatagctataataaaaataaatatctaggaacaaatttaaccaaagaggtgaaagatctctatactgacaactgtaaaaccctgatgaaaggaattgaagaagacacacaaaaaatgaaaaggtatctatcccatgttcatagaatggaagaattcatattgttaaaatatcaatactactagatttcatgtattacctatcaaaataccaataacatttttcacagaaatagaaaaagcagtcttaaaatttgtacagaaccacaaaagacccagatatggtttggctgtgtccccacccaaatctcatcttgaattgtagttcccataatccccacatgtcgtgggagggacccagtgggaagtgattgggtcatgggggcagttttcccccatgctgttctcgtgatagtgagtgagttctcatgaaatctgatggttttctaagtgtttggcatttcccctgctggcacttattcccactgccaccttgtgaagaagatgccttgcttcccctacgccttccaccatgattgcaagtttcctgagacctccccagcaatgcggaactgtgagtcaattatacctctttcctttatagattacccagtctccagcagttctttatagcagtatgagaacagactaatacagtaaattggtaccgaggtagggggggcactgctataaggatacctgaaaatgtggaagcaactttggaactgtgtaacaggcagaggatggaacagtttggagggctcagaagaagacaggaaaatgtggcaatgtttggaacttcctagagacctggagggctcagaagaagacaggaaaatctgggaaagtttggaacttcctagagaatcattgaatagctttcaccaaaatgctgatagtgatatggacaatgaagttcagactgaggtggtatcagatggagatgacgaacttgttaggaataggaataaaggtggctcttgctatgctttagcaaagagattggcagcattttgcccctgccctagagatctgtggaactttgaacttgagagagatgatttggggtatctggcagaagaaatttctaagcaacaaagcattccagagtgacagagcataaaagtttgaaaagtttgcagcctgatgatgcagtagaaaagacaaacccattttctggggagaaattcaacccagctacagaaatttatataattaacaaggagccaaatgttaatcaccaagataatggggaaaatgtgtccagggcatgttagagaccttcgcagcagcccctcccatcacaggcctggaggcctaggagggaaaaatgctttcgtggcctgggtccagggctcccctgcagtgttcagcctgggacttggtgccctgtgtcccagccactccagctataagaggccaaagtacagcttgggctatagcttcagagggtgcaagcccccagcctttgttctgtgggtgcacagaagacaaaaattgaggtttgggaatgtccacctagatttcagaggatgtatggaaatgcctggatgtccaggcggaggtgtgctgcagaggcagagccctcgtggagaacctctgctagggcagtgaggaaaagaaatgtggggtgggagcccccacacagtcaccactggggcactgcctagtggagctgtgagaagagggccactgtcctccagaccccagaatggtagatccactgagagcttgcaccgtgggcctggaaaagccacaggcactcaatgccagcccatgaaagcagccaggagcagggctgtaccctgcaaagctatgggggtggagcttcccaaggctgtgggagcctgccttttgtatcagggtgacctaaatgtgagacacggagtcaaaggagaacattttggaactttcaggtttaatgactgccctattggatttcagacttgcatggggcctgtagcccctttgttttggccaatttctcccatttggaatgagtgtatttacccaatgcctgtacccctattgtatctaggaaggaactaacttgcttttgattttacaggctcataaacagaagggattttccttgtctcagatgagactttggacttggacttttgggttaaggctggaatgagctaacactttgggggactgttggaaaggcatgattctgtttttaaatgtgaggacatgagatttgggaggggccatgggtggaaacatatggtttggctctgtgtccccacccaaatctcatcttgaattgtagtatattgtttgtaaaaattcctgcctatccagagattttttaaaaaaaaacaatactttcttcaattttctcttacaatttaattttttacatttaactttttaatacttcctgtagactaaaagttattttggtgcattgtgtgaaccaaagatcaaagtagttttatttttttctgaaaacatctattcattttttcaattaattgattgtttatattaaggatctaggaggatctaaaattatggaattgtgggcaagggcaatttttgccttacatttcatgtaaggcaaaataatccccatgtgtcatgggagggacccagtaggaagtgattggatcatgggggcaggttcccccatgctgttctcatgacagtgagtaagttttcatgagatctgatggttttataagcatctggcatttccccttctgtcacctctccctcctgccaccttgtgaaaaaggtgccttgcttccccttcaccttccaccatgattgtaagtttcctgaggcctctccagccatgtggaactgtaagtcaattaaacctctttcctttataaattatgcagtctcaggcagttctttataccagcaggaaaacagactaatacagaccctaaatatccaaagcagtcctgagcaaagagaacaaagctggaggcatgatgctactttatttcaaactatactacaaagctgtagtaaccaaaacagcatggtactggcataaagacagaaacatatgccagtggaacacaacagagaacccagaaatgaatccacacatttagagccaactcatttttgacaaagtgccaagaatatgcattggtgaaagaatagtctcttcaataaatgatgttgggaaaactggatatccacatgcagaagaattaaactaaacccctatctctcactgtatacaaaaattaaatcaaaatggattagagacttaaatatacaacctgaaagtatgaagctactggaagaaaacattggggaaatgctccaggacattggtctgggaaatattttatggcctgggaaatatcaaaagcacagacaactaaagcaaaagtagacaaacgggattatatcaagctataaagcttccgcacaacaaaggaatcaattaacaaagtgaagggacaacctacaggatgggatgaaatatttgcaaactatacaactgagagggtattaataaccagaatatataaggaactcaaacaagtcaatggcaaaaaagcaaaggatcctattaaaaatgaacaaagatctgaataaacatttctcaaaagaaaacatacaaatggccaacaggtatatgaaaaactgctcaacatcactaattaccagataaatgcaaaccaaaagcacaatggatatttcactccagttaaatgacttttatcaaaaagacaaaaaataatgaatgctgatgaggatgtggcaaaaggggaatgcttgtacactattggtgggagtgtgaattagtacagatactatggaaaagagtatgtatgttcctcaagaaactaaaaatagaacgaccatgtgatccagcaatcccactgctggatatatatccaaagacaggaaatcagtgtatcaaagagatagttgcacaccaacatttattacagcaccattcacaatagctaggatataaaatcaacctaagtatacatcaacagatgaatggataaagactgtgtggtatatatacacaatagactattactcagccattaaaaagaatgaaatcctgtcatttgtggcaacatcgatgagcctggatgtcactgtgttaagtgaaataagccaggcatagaaagacaaatatcacgttttcacttacatgtgagagcttaaaaagtggatctcacggagatagagagtagaatggtgcttaaaggagtttgggaatggtatgggggggtgggatggaatgaagagaggttgattaataggtgtaaaatgaaggggtggcctgcccctcgtcacccacagtgacgagaaacactgtgggtgtttctcgtcaggtgggacgagagactgagaaaagaaataagacacagagacaaagcacaggaaagaaaagtgggcccaggggaccggcgctcagcatacggaggacccgcgccggcactggtctctcagttccctcagtatttattgatcattatctctaccatctcggagagggggatgtggcagaacaatagggtaatagtggagagagggtcagcaggaaaacatgtgaacaaaggtctctgtgtcataaataagtttaaggaaatgtgctgtgccctgatgtgcacgtatacaaacatcttggtgcattaaagagcagtattgccactagcctgtctcacctccagccttaaggcggttttctcttttctcagtaaatagaacatacaatcgggttttacaccgagacactccattgcccagggacgagcaggagacagatgccttcctcttatctcaactgcaaagaggacttcctctttcactaatcctcctcagcacagaccctttacgggtgtcgggctgggggacggtcaggtctttcccttcccacgaggccatatctcaggctatcacatggggagaaaccttggacaatacctggctttccagggcagaggtccctgcggccttccgcagtgtattgtgtccctgggtacttgagattagagaatggtgatgactttttttattattattattatactttaagttctagggtacatgtgcacaacgtgcaggtttgttacacgtgtatacatgcaccatgttggtgtgctgcacccactaactcgtcatttacattaggtatatctcccaatgctatccctccccccaccccatgacaggccccggtgtgtgatgttccccctcctgtgtccaagtgttctcattgttcaattcccacctatgactaagaacatgcggtgtttggttttttgtccttgtgatagtttgctgagaatgatggtttccagattcatccatgtccctgcaaaggacatgaactcatccttttttatggctgcatagtattccatggacaagcatactgccttcaagcacttttttaacaaagcacatcctgcatagccctaaatccattaaaccttgactcaacaccgcacatgtctctgcgagcacagggttggggctagggttacagattaacagcatctcaaggcagaagaatttttcttagtacagaccaaaatggagtctcttatgtctacttctttctacatagacacagtaacagtctgatctctctttcttttccccacagtaaaattacacttaaatagaagggataagttgtagtgttcgatattacagtagggtgactatagttaacaatgatttattgtatgtttcaaaatagctagaagagaagactgggaatgttcccaacacaaataaatgacaaatggttgaagtgattgatattccaattaccatcatttgattattacacattgtattcatgtatcaaaatatcacatgtatccccaaaacatgtacaattatcgtgtatcaatttaaaaatacatcatgataggcacctctcaggttgactgtactgtcctgattattgctagtggtgttaacaaatttgaagctagtatctttaagaacgggcagacccatgagcatgcccttctggtttacacactggaagtgaaacaactaattgttggtgttaaaaaatggatttcactgaactatgccatcgccaacagagctatgtggaaatcaataaggaagtcagccctacattaagaatactggctacaaccgcaacacagtagtatttatgccaatttctggttggaatgctgacaacttgctaacatgccttggttaaagggtggagagtcacctgcagagatggcaataccagtgtagcacaccgcttgaagctctggattatatcataccaccagctcatccaactgacaaggcttgtgcctacctctccaggaagtctacaaaattggtagtattggtaatgtctttgtgggcctagtggtgactggtgccctcaaacccagcatgattggtcagctttgctccagttaacattacaactgaaataaagtcttttgaattgcaccatgaagctttaaatgaagctcttcttggggacaatgtgggcttcagtgtcaagaatgtgtctgtcaaagatgtttatcatggcaatatggcttgtgacagcgaaaatgactcgccaacggaagcagctggcttcctgaaccatccagcccaaatcagtgctggctctccacctctgttggattgtcacacagctcacattgcttgcaggtttgctgagctgaaggtggttgatttccttctggttagaagctggaagatgacccccattgtgatttttattgctatggtttctttctaatttagtcttgaggtctctcccttgagaatggtcataagccaagagagccactttctaggagagtcctgaccagggggaaagttaagtttgagtgtgtcagcttggtgagacacaatgaggaagtaaaaacaaaataaatagtggaatagaatactaacaagtacctagaaataagtctagctaaaaatttgcaaaatgtctatggaaaaaaaaactatggaaatttactgagaaactttaaagagtacctaaataactttcaagatataccacgtacatgaattggaaaacatgatatttgaaaatgtcggttattcccaaactgatttatagattcagtgcaacctgaatgaaaatcccaagacgttccttttgtagagctcaacaagctgattctaaaattaatatgaaaatgtaaaggtttatgaatagccaagtccttcttgaagaggaagaataagatgagagtaattgctgtctaatatattgagacttattttaaagctataataattaaaacaatgtagcagttggtatagggataatcaaacaggtaaatgaaatagaatagaaaatccaaaactagtctaacacatatagaaacttgatttatgacaaaggtgtcacagaagtagagtttcaataaaatgctggaaaatgttggtatctatatagataaaacattacattggattcctaactcacaccatacacaaaaatccattcacattgcattacaagtctaaaagtgaaatataaaatcataaacattttagaaagaaaatgtaaaagaatatatcaataaccacagggtagggaaagaaagagaattgacatcaagatacaaaaagccctagccaataaggtttttttttataaattccacacattaaaattacaaacttatgctcatcaaaagataacataaaaacaatgaaaagattagccacggaatggtaaatgtttgcaatacataacacaaaggacacacaaaggaaacttatataatagattttaacaggcttctctgtgtccttcttctccagcaatcaaggaatatataaaaaagcatatcaaggatatatagggtactcttttgattcaacaagaaaaaagcagattatccaagagaaaacttggcagaaaaaagcttggataggtgctccacaaaagaggacatccaaatgactgctactcataagaaaagatgctcaacctcatagaacatccaaaaatgtaaaaacacagtcaataccagatatttgtaataatttggagcaaatggaactctcatacattgctaatgaaaatggaaaatggtccagctgctttggaaaacagtgtggcaatacctaccaaagccaaacacatgcatacctagtaattccgcccaacagaaatgcacatatatgttcaccaaaagatatgcaccagaaggttatagcaggtccatatgaaagtgccaaagattataacaactcaaatgtccgtgattagggtatattcatataatactatacaacaatgggaatgaacaaactatagctacatatgataatatagatgaatctcacaaccagaatgctaagtgaaagaagaaacaaaagaatatatgtagtatgttttatttacacacttcaaaacaggcaaaactaaactatatttttaaaggatgtatacgtaactggtaaaattataaagaaaagcaaagaaatgattatcataaagatcagaatggtggttaccttcagtgggaagggagaaagtatgattgaaaagggacatccagtgagtcttgtgggttgttggcaatgttactgatctgggtgatgattgcatttatgtaccaaaggcatttgtgttttatgcactttattgtatatgttttagttcacaatttttttagttcacaattttaatagggctttaaaaagtaaaaagaaaagagatccaagggcttgaccatgggactctcttatatttggagtatgtttataaactttacattcattcaacattcgacaaatattttttgagcacctactttgtgccaagcaccgttacaggtgctgggaatacaacagggaacaaaacagacaaaaccccagctttcatggaacttacatgctaataaagcttggcaagagtatttcaaggaagatgaagtggttaactatgcaaaatgcttctcaggcacctaggaaaatgaggatgtgaggcatttctacccacttggtacataaaattattgcttttcctctgctttttttctccagggctcagagtggcagtgtccctcagttcaagaaagttgttttccaggaatttactgatggctcctttactcagcccttataccgtggagaactaaatgaacatttgggactcctggggccatatataagagcagaagttgaagataatatcatggtgagttaaggacagtggaattacaagaaaattaattttatatatttattttcttgctgactataatgtattcccacttttggaaatttttaaagtatagaaaaataattccataattatctttgtgtacgttctatttttcctatgtatttttctccttatgtattcaaattataccatgcagaattctgattcttgtttttttactaaatatcacatcataaacatttcttacgtcattaaaaacacttcctatgtatgtttttaaaatactgcataatagtctattatatgaatttatggaaccatagtttatgtaaccatttattttgaacaagcttttagacagtttcttttttcactatataaataacgctgtaatcacaacagtttttctaagataaaattccagaagtgcaatgtatttgagcatcttaagagtttttcttattaattatttggtaatgtcccttgcacatttgtctttcatggaggaagtgcttttcttattgattatgttaccttatatattagatagtaaaccactgaacattttaatgagaggtactttttcaagtttttgttttctcttaattttataaatgatggtttttgaaataaaacaggttttaatttttaggtagtaacccatcaatctttactttttgacactttcattgcttttatgtttataaaaattcctgcctatccagagattttttaaaaaacacctatactttcctcagtttttctcttacagtttaattttttacatttaactttttaatacttcctgtagactaaaagttattttggtgcattgtgtgaaccaaagatcaaagtagttttatttttttctgaaaatatctattcgttgtttcaattaattgatggtgtatattaaggatgtagaaggatctaaaattatggaattgtgggcaatttttgccttacattttattttactttccattatattctatgataaatatgtataatttttaatctggaaagtaagccttttttaaaagataatatgcattcattctagaatttgtcatgaagaaccttaacttacatatcaactcctggcgttatggtctcttataacccctgcagtaacattttcccttttactctggaatggcttttatgtgtttaggaattttctcctttgcaactttgagttcataccttaaatttagaatacaaaacctcctcaggattaggtttgagttctaacagcatccatcttctgtaccacttcttccagggtattaaaaactttgataaagaccaaaagacaggtatttcttttagggatgtaaaccctaaggaccttaagatcctagaagattattcttgcttttttttttttgtcgttattgttctacaggtaactttcagaaatcaggcctctcgtccctattccttctattctagccttatttcttatgaggaagatcagaggcaaggagcagaacctagaaaaaactttgtcaagcctaatgaaaccaaaacttacttttggaaagtgcaacatcatatggcacccactaaagatgagtttgactgcaaagcctgggcttatttctctgatgttgacctggtaagcaggtgtctattgtgctgaccactttttggtttaaaagaaatggtctttgtgtactaagaattttgatatttatcctacgtgcaataagaagctttaaataggagagttgatcattatatttgtgttttagaaatgtcattctggaatctactgaagaggatggattatatttttggaaggtgggaggcaggttggactggcataaaaattgatgagaaatccactctggttcataggtgagagagcttatactcataggattgatgtcttccctccctaggaaaaagatgtgcactcaggcctgattggaccccttctggtctgccacactaacacactgaaccctgctcatgggagacaagtgacagtacaggaatttgctctgtttttcaccatctttgatgagaccaaaagctggtacttcactgaaaatatggaaagaaactgcagggctccctgcaatatccagatggaagatcccacttttaaagagaattatcgcttccatggtaatatattccacatccaaacattatcactgtgaaatgcagattgcactttgacaaatgagacttgatccagggacttgaacattgtatttatttagagtatatctgtgggagtggaatcctcatagatgtcagtttttttggtggagtggagagaaagaaacttatataatagattttaacaggcttctctgtgtccttctccagcaatcaatggctacataatggatacactacctggcttagtaatggctcaggatcaaaggattcgatggtatctgctcagcatgggcagcaatgaaaacatccattctattcatttcagtggacatgtgttcactgtacgaaaaaaagaggagtataaaatggcactgtacaatctctatccaggtatgagcttgtttgtgctctttcttctacctactctatttgttgagtacttactttaaatggtctaggcactgggaacacaatcagtgatcaaagcagacaagctccatgctcttaagtaatactttttcaaatgctttttaaaccatttgttcaaagcaaatgaacaagataatttcagatatagaaaaattgctaaaaaggaaatagaacagaataaatggataattaatgtcacagtactttcctagggaaaaggaatttattcctttatcatttaccatctcaaatcccatagggcaccagtagtcatccaaagagtcatttgtttatgtatgtaaccagtatattgattaagcactactcataatgttgatcacaacacaattttattttggttcttcactgtccctttaaaatagatttggccaggtgcgatggctcacacttgtaatcccagcactttgggaggccaaggttggaggattgcttgaggccaggagttcaagaccagcctgggtgacaaagcaagacccccatctctacaaaaaataattagccagacatgtggtatatacctgtagtcccagctacttcacctacttgggtggctgaagtggaaggattgcttgagcccaggaggttgatgctgcagtgagctatgaaagtgccactgcactcaaacttggacaacagagcaagaccctgtctctaaaaaaaaaaaaccatccagtttaatagcgggggtaaactttccttatttcttcgtaaaaattctgataagccctgtaacttttctgctcacccttaagtaataaacaggactaaagtcactttatgtcacaaatacagttcaaatcagaaattacaatgtccatcccaagatattaatcaaaattgtaaacttgatttaacttcaatctcccctcctccaacttgagcctgcatcaggctggaagtctgcattggaaaagggagacatggttgagtcctctgtttctgtaccttgtgatgatcgtgcttccccacaacccctttatagctgctgttttgaactccaacatggataggttaaaggtaaggggataagatagttcttacctatttacagctggcaccattgttgtaaactagcttaacactgtttgtgcctggcaatacttgttgactctttctcctgcagggcactttcagggaactctttagagactcccttacgtgactgtcatgaaatccccttgacatgatttcttccacctttactctgggtggtcacttgtgactcatttctcagccctcagtgttcacctgcagcttcttgttgctggggtaactttacccttgtaggcagctctagtggactggatccagagggaactcaccctgacttatctgtttcacagagtccacatctggccaatgggaaacacaccttttgctcagaaagaccctgggaatgtaggtcaatcataatgcagtagcattctcctgtcccaaccatcaaagaattcagtcaccctgtttctcatctcctggggggaggggagtggtcagaactcaatctccacaacccccaactgtaagggtcacgtagcaagcactttgcatttgaggggtccaaaagtagtggaactaccaaatttggtaggtctactctgatatttcgcataaaccaatgtatctcatgctcattttttagtgaaaagaaataatttctgttcctgttggtttttataaggtgtttttgagacagtggaaatgttaccatccaaagctggaatttggcgggtggaatgccttattggcgagcatctacatgctgggatgagcacactttttctggtgtacagcaatagtgagtagcaatgtgggcagaggttccctacctactcagcctacttctttacagctttcttcctttctggaatggttgcttgtgtcaggaaataaatacaagtttacatcattatcaaatttaaaatgaatattgctggtagaaatcatcagagttctcagagtagggcagatatacttgaagctttgaacactttgtacctgaagctctaaataattgacaaaaaaaaaataccacctcattttcacaacttggtaaagctcgaagatctccagtagcagattttggaatttaatgttgatttagttaccagataacttagaaatactacttggaagagtttggagatttaaccctaaacaagtaagagagccactggtctatttatgtacggaccccagtttcttcagctgtaaaatgtgaatcattctagcacctgttaggattaattaaatgaactaatacagtaaaacgttgagtacagttcttggcacatttaaacactaaaaaatagcatttgttgacgttctcccattttcattgacttacatttgagaagctgaattttgtgcacttctagttactgtgttccacccgtttcatttcagagtgtcagactcccctgggaatggcttctggacacattagagattttcagattacagcttcaggacaatatggtaaatactattatttttgctccaagaacctgggctgattatatctttttttaataatctggtggagaatctcagataatgaatccatctccatgcttctattagttctattccataagtgcctctcaaatacatctcctcctctccacttcccactgtggccatcttaactcaggtcaccatcatttcttacctgggcaatgacactgcctccttaaatatcctccctaccttcagtatttcttccttgagtcaattcttttcagtgcagcaggaagctatactttcctatgagcagtaatggtaaagtttgactagggtctatagagaattctcagaaattgttttagagcactactgcccacaggctaaatgcagcacactgcctgtttttgtatggcatgtgagctatgaacagattttccatttttaaataattgtcaaaaagatgaagactatttcatgacatgtgaaattataaaattcaaatttcagcatccgtaataaagccttattttggaacacagccacgtccattaatttacatatcatctatggctacagcagcagtaacatagttgcaacagagaccatataatatgcaaagcctaaatgatttactatctggccctttacagaaaaagtttgccaacctatgttgttgtgaggtaaaaaaaaatcctcttgaaaaggaggcgtgagagttttacaccaaaatagtaacatttttcactaggtggaagggttacattttaaaatgtcttttatttgtatttttactaatttttacttttcattttctgatttttctacaatgaacatacattgcgtaataaataataggcggggcacgttggctcatgcctcccagcactttgcaaggctgaggcaagcagatcacctgaggtcaggagttcaagaccagcctggccaacatggtgaaactccgtctctactaaaaatacaaaaattagtcgggcatggtggtacgcgattgtagtcccagctacctaggagactgaggcaggagaattgcttgaactcaggaggtggaggttgcagtgagccaagatcatgccattgcactccagcctgggtgacaaagcaagactccatctcaaaaaaagaaagaaaagaagaaataatattattatttggtagtgttggtaacaaattgcagtatcagctagttagaggtgctaacaattaacaaaattataaattttagaaaataaaatggacaacaaggataagcaatatccttagatagtaattgatactggtatgccataaagcctttatgtttttctctattttcaccacagcttagattaacctttctcaagacaataattttattctcaagtgtctaggactaacccagctgaatttaatctctgtttctttacttgggcaaaggacagtgggccccaaagctggccagacttcattattccggatcaatcaatgcctggagcaccaaggagcccttttcttggatcaaggttagaaaatgtaatcaatgatgggaaatgtatcacattcaatcaattgcattacttattcctcttgcaagctcaaaggattctatgaatatgagaaaactaaagaacagaatgccttaatgatttgtacaaaagcagtcatgaacaaagagatatggggatagaattgagtatattgatatgtcctgtttctgtattttagtccttctactgggattagaacatctgaatattttctataatattgaactcgtcatctctcaagacagtatatgttattattagatgcttccaactgcccacgtgtccttaagtactccaatcccctttattttaacataaaacaaatggttcacaaatgcaaaccacatgtgtacttttacattttctgtagccacgttttcaaaaatgtgaaattcactttaataatacattttatttaactcaacatatctgaaaatactatcatttcaacatatgatcaatgaggccccttcaaagacagacagatggaaactcttgggtctcttccatgcctcacaaaagctgagggcagcttggaagtgcctgctcagcctctccacctaaacataaggctagatgccttctagaagcccaaacaggaaatggagaaaacattttggtttccatctttgcaaatagcatgtctattaatgccacagcattgttttgtagacactgccaattttgactcaatctgagctgctgttcactaatccctaagtattttttgttggtttgtgcttctgccaaacaacatgttatgttcttcaccttgtatttctatggttattttcaaccttaagtgtatccctatatagagaacatgtttatctatttggccaccctgtgtctgtctgtgctatttaattttttgtaataacattcttatttgggagggcggaattatatcttcctcactagatacaacctgataagactagtaaatagagtgtcctgtctgtgcctagccaatgaaccctgaatgatatactctgttgtttccacttactagatttggcccattgtttcagcttgccgatcttcagtgtcccaaagtatttcctagtttttccagttactgatttgatcagtaaactttctaatactgcagcaaagtcatgatcaaaatattgaagtagacaagacttccttagtatgtgcacaatacaaatcaagctgttaagtccttactacaaccttgtgaggtagatgttactatcatcttcatttcagataatgaaattgaagcatagagaggttattgtggcccaagtcacatggctaataagtgactgagccaaaattcaaattctgatagttgggctccagaaccctaactggtaatcgttgtactacactgtttccggaatgctccctttaagttgataaccatctattaactgtcactgttcacttgtggtaattaaaccagttacaaatccacctagttatgttatcatctaccactattgaatcgccttatcttcaaggtggttttgccatctgtcctactaaggtccagctagactttttatagatctcgtaactttataaaataaaccatggagatggagttgaaagggggtgctgacaaggaagggagttggagaaggcatctattctcgtgagaaggcctgaagagtgcacaacagcctggccccaagacacaagagcactgggctggcttgaggagcaccaggtgaccaagaccaggcaatgcacagggggaagtcagcaggccccatggagatacgcagctgcagtgtttgtacttttatacagtgaaactcattaccaccttgcttacttcctagtagagagatgtgtcttgtagttacactgaaacacctggctgggcacataggtgaagctgttgagtctgtaattgtcaaactgctcccaggtgccaattataatgtagaagaggcacaagaagatgaagtggataagcctggcagtttgtcaagcattcatcagttgtcaagcatttgtcagttgcagaatgtaggtaggctgccaaggctttattgtagcctggttctattgcagctttattctagcaaggctgctggaaaatacaataatcactggtccaagaaagaactcttatactctatctatatgaagaaacagtaaaagtcaattcagtagaaatcatgatttttgtgcctggtgctttcacttttttatgccacaataccaagaggttaaaatgaagtgtctttgattgggaataccatctatctgggaaaagacagggctgcaacttctgaagaccttgacactctgtcctgttaccctgcttcatttttctcctgcgcttatcactacttgatgctataaacaaataaaaacatatatgatataaggtctatttctcctactcaactgtaagttccatgagggcagggctttctttcttgtttactactctattccctgtatctaaaacagtgcttggcacatagcaagtgctaaaaaatattctttgaatgagtgtatgaatggaacttacagtcagctgaaggagacagttattaagcataagagtgatgaccagtccaattgtgtgtgtcaggcatgtgtgaaaacgtgctaaatttgacttgcttattaggacagtaactgatacttctaatgttcttgcagcccatgacctcttctttaagaagtgtccattctgtactactttcccattattcactcattcattccaaagcatttgctatacagcagtattataccagataccatattaggtgctggggctagagagaatataaaagctaacattgattgagtgtttagtatgcgccaggccctgaactcagcacattacatgtattaactctttaacccctatggcagccctttgagataaaaactaatattatcttcactttacagataagttgagacacagaaagttaggtgactcaaatgggttcactgccttaaggatctcagtctaataaggaaagcagaaaagcaaagcaaccttataatatggtgcaataatttgctataatgaagttatatacaaagtgaagtagaagcatagaagaagcagcactaaatttgtctgggtgagtcagagaaggctaaccaggaaaaatagtttctgaactaacacttgaaggaggtgtagcagttcatcactgacagtgatgttggggtgggtctggtttcaggagaggggaggaaattggctttggtctgaggctgaggtgtgggcaaagcattagcttatgtgggtccattagcttatgtgagtccacaaaaggtgtgtgtgtgtttgtgtgtatgtgtgtgtgtgtgtgtgtgtgtgtgtgtgtacgaaatgggggctcaatgatttggtagtggtttggtttgtcaagaagcaggctgggaactcaataagcatctttccattcatttctactgtgtatcccacagcttcacacacacatgcacatttcaacattggtgactgcttcacttgcacacctaaggtaatgatggacacacctgtagcaatgtagattcttcctaagctaataattagtttcaggaggtagcacatacatttaaaaataggttaaaataaagtgttattttaattggtaggtggatctgttggcaccaatgattattcacggcatcaagacccagggtgcccgtcagaagttctccagcctctacatctctcagtttatcatcatgtatagtcttgatgggaagaagtggcagacttatcgaggaaattccactggaaccttaatggtatgtaattagtcatttaaagggaatgcctgaatactttaaagaattttggcagatttcagatattggacaaacactcttagcttccacaaacttaattccaaaaaataatttttcacttatgagcaatagagttattacggacatatcagcaaaaatgtagtagtgtcaaggctcatagatgatagaaatgaagagatgctgtattgatagaaatatgtgattcaggactgtgtggattgatgattgtgagcttgcttatggatatcctaggtttgaggttatagtaggacaatcaggttgaaatgtccagcaggcagtaggtgaaagacaagtttagggggcaaaaccatggatggagatgaagattcatgacttccacataaaaggatgggtgaaactttgggaattgatgaattctctagaggtgagctcaagacccttaaaggcttaaaacctcagcgttattgtctactcttccctcatttttatgcccacaaatctggtcaatcctttatttgcaatgcctctcacatctctttcttctgtttccatttataccgctgttgccacagcccagggtcccatcacctcacacttgatctattgtattacattcctaactagtcttcccccgtttctaatctgttctccgataaaagctgcacatcattttcaggataatcatcagtcgcctgcctaaaacttttcaatgtcttcccattgtctttagaataaagttcaaagtcttcaaatgaccccaagcaagataacttttgtttgcccctttagatccattttcctgcttctctaccctgcttcttgttctgtgaggtgagcttgtatagaatacatcaacaggttaccttgtcctccagcttttggttggatttcaccaacagggagcactggcaaaagattggcatatttattcttctgactttctccttgcagaggagttcactgtatctccccacttaaggtcactgtttccctcagagtggctttttctacctgtactagctactattgctgtgtaccaagccacttcaaaacttgctgtcataacaataaccattatgttttgctcacagattctgtagatcaagactgggacacagtggggatgggtggtttctggagcctcagttaggattatttaacagctgggtgctggaatcatctggaagttccttctcttgcttttctggtggttggtactgactgtcagctaggacagaatctggggttgttgactgatgtaactttacatggattatccctgaggcctggccttccttacagcatgtttcaaggtagttggacttctttttgagggggggtaggaaggtggggggaggacagagtctcactctgttgcccaggctggagtgcactggtgtgatctcggctcactgcaacctctgcctcccgggctcaagtgattctcctgcctcagcctgctgagtagctgggactacgggctcatgccaccacacccagctaatttttgtatttttagtagagacagggttttgccatgttgaccaggctggtcttgaactcctgacctcaggtgatccgcccacctcagcctcccaaagtgctgggattacaggcacccggcctgtagttggacttcttacacgtcattttagggcctccaagtgtgagtgttacagttaacaaggtgaagactacataaccttttctgaccgagtcttctaagttatgtagcatcacttttgttgacaaaaagtgttgaactctataaaatatttgaagagatttattctgagccaaatatgagtgagtatggcccatgacacagccctcaggaggtcctgagaacatgtgcccaagatggtcagggcacagcttggttttatacattttagagaggcttgagacatcaatcaaatacatttaagaaatacactgatttggtccagaaaggcgggacaactcaacctgggggcttccgggctataggtgaatttaaacattttctggttgacaattggttgagtttgtctgaagacctgggattgatagaaagggaatgttcaggttaagataaacattgtggagaccaaagttcttttgaagtcttatagtggctccccttagagacaatagatgacaaatgttttgtattcagatcttagttaatctctttaggattgggaggggctgggagaaaaagatctagctatgttaatagagattctttacagttgcaaatttccctccacaaagaacagctttgcagggccatttcaaaatatggcaaaaaaacatgttttggggtaaaatattttgattttcttccttgtctcataatgttatgccagagtaaggttggaaagtaaatcatgacatataaggttaaataaaacccatctgatgagaatttatgatttgtagggcatgactccccagaccccttagataggaatttgggcaagataaaaaaaaatcagagtttagtcctcactttcaatacattctattggttataagcaaatcgcatatccacccagattcaaggggaagagacatagaccctaatttttaatgggagaaatgttaaataattggtggtcattttttaaagccactacaataatctatccaattctctctttcaggatgtttctctcttctgatcctttcaggtttagggattgtcaacaaacaaaaagttaaaccctgtaaaatacttgaagagatttattatgagccaaatatgagagaccaatggcctgtgacacagccctcaggagatcctgagaacatgtgctcaaggtggtctggctacaacttggttttacgcattttagggagacataagaccgaaatcaatagatggaagatgtacattcattgagtttggaaaggcaggacaactggaagcgaggcggggcttccaggtcgtaggtagattcaaagattttctgattggcaattggttgaaagagttaagttattgtgtaaagacttagaatcaatagagaggaacatcggggttaagataaggggttgtgaagaccaaggttctgtcatgcagatgaagcctccaggtagcaggcttcagagagaatagattgtaaatgtttcttatcagacttaaagagtctgttctatcagtctgaaggtctgtgttgatgttaatgctggtcagatttttctgaattccaaaagggaggcgggtataataaggcatatttgatccccactttcccatcatggcctgaacgtttttcaggttaactttggaaggccctttgccgaaaggaggggggattagaattttattttgggtttacaggatggtaatactctgttcccaccctcctaactagtatctttattaaaccttccacaaattatcctaatttccatgttttctgttccttgctggatcccttgtttcatacagtaattggtgctagaagaaaccccaggaaacagattttcaaaatgcaattctaaggttatgttgctaatatattcaagaaacacagagataacatatttgccaaggaagaaaatgagcagttagggaatccatgacatgtgttagtattatagtttctcagattatcaccagtgatactatgggatgagttgcagatggcaagtaagacactggggagattaaatgacagtggcatttagtcactgtggcaacaaacgtagcattacctgattgtagagtggtctgtcttcttacagccctagagggcatacacatggaaaaagaaatgaaatgttatgaatatatacaaaataagaacactgatgaacatacatggaaaatcaggatgcatgcatagagcttttgaggaatactccgtatcctgtggttgtaggcagatacgacttaggggctgagcataagttgcagagctgcagtgacaattaaatgcttaactccaccagatctattatgctgtggtaagagtaccggtgggaaggagtgaaactctgaggcctgagatggaggcatttaggcagacatggatgaggctgagaattgcaaacctccaaattcccctgaacctcctttgcctgaggaggcaaccactccccagtctctgaagcagtcatccctcttttgtgtaaaagcctttcagtggctataactgagataggtgcctcacaaaccagtgactattctccttagagaccctgtttggacactacgaaagccaggcgagtcacagaaaatgacagcagatcacaaatttaatcaggtggtgatgccaaaaaacaattgcaattccagatatcatatctctgttgaagcaaatttacacagccccaggcacctgatatggaagtattgacctagagaatgttttttcttcatttccatacattagtaaaatcagaatacatttgaatttaccaagtaggaacaagagtattaagtttactgcccatgcatcagggcaatgttagctctcttgttttctatcataatatagactcaagggacctcaaacatctttacatcccacaagcacaatgcctgtccattacactgatgacattatgctgacaggatctggtaaacacataacaaataagcctgtcttgctcttgactttaatgagaatgtaacctgtgtttcactgtttaatataatgttcactgttagtttcaaatactttttatgatgtttaaaaagttttctcctatccctattttatttgcaatggcaactgaattttatcaaatgcttttccagcatctttgacatggtcacatttctcttttgtgttgtcaaattatacttaacattcaatagtgtgctgacaagaaattaacaacccacaggggagcaaagtgagaagaggttaagaagtaaaggccttgatttatagcattggcagatttccctgacataaatactactcccatcatgcctggccccagggatgggaagagatgcttacttacaattggctctcacagaccagtgcaagagcactactgtgctccatttctgggaaaactttcgtcagtcatagtgtgttagttatttaaaacttagctggatccaatttgccaacatttcatttataatttctatatctatattcatgaatgaaatgggtttagctttttcagtagctctacttaccaggttttggcatgagggttatattaaacttgaaaataaagtgggaaagcttccatttttttccatgaagactattgctctagaatagcttatttaatgtaggaatccagtatttaatgagagtaaatgaaaaagccatatgagccatgtgctttatttagtgagagatactaggctatattttccaatcgttatatgattattgctattctcatttgtgttgccttgagttaatgtctgcaaatgtgcacattagagtcatatatcccttcctgtgccatacatctatatctgtatacacacatatgtcttttctccttttttcccttctgtatcaagagttggcaagtgtttgtctattctattaatttttcaaagaatcagctcagttttaaacccaaacgtggttttgaaagagctgtttctagttcatcaatctctgttcaaaactttaaaaattctattttcctttcttttggtttgtttcctacaatctggaggtgaatgcttagttcacttattcttcaatctttgtattttaacgataaggataaattacttacagttattaactactctcatgaggttcattccttgaacagtcactgagcaactactatgtcctgggttctaattcaggggtgggcaaactatagccccagaatttggcccatagcctgcttttgtacggactgtgagttaagaatagtttttacacgttgaaaggattgcaaagacaaacatacaaagaaacaaagaagactgtgcaacagagaccacctgtggtctgtaaagactaacacatttctatcccgcccttgacagaaagagtctgtgggctgctggtctcctctaacggtggtagagatgcctgcacggttaacattaatccttggcaccagaatcctcagcacctaggaaccagatcttgcctaacacgctaatttcagtcttgaccaccttcctccggcgtagcggttctcaaacgtctttgtctttgtactattcacgtataaaatattctttcataagcaacatttatccttttgggaatacctcacaatggggagaaggggaaccccaacagcctttaagggttcactgcttcgctgccaccatttccgacggtttacactgttttaagtgtgaatttggaattgttttcaagttaaaaagcaaactaatcatgtcctctgaaagtatttgcttttggcatgctagaaatcagtgttgacttttgatactgatgtgatacattacgagggaattctcaaaactgctgaaatctggcctcggcccagttatcactgctcttaagcttctgagggagatacatgaatgagcccacggcaaatggaaaacgaggagttttagtgtttcctagaattatgctcagatacccactacctgaccgtctggttatccttcccctcacctccctgacgcaaggagtttggaccagaggcctaaggaggcttctcctgaagcccaaatcccaaactggtcaccagtcatgctccgtaactcctgaacctgacaagaagccagccggccaggtctgcagcccgggttaagaggagcataccaggaaagagccaaagagcaaaggagcatgagcccttcaaccgcttttacaataatttgggctaggcgttcagggctccgtaggacccttcctggcagccaagtgagagaaagaggaatgatggtggaatgggcctctcctgtgcttcccattacttccacactgtcgaaatagaaatagaagcagaaaagaacaccctacaagtcccacccatttggaggcactcaactcacagtgacaaccctccacacctctcccctgcaaaaagacgcaaaacaaaaacacctactccaaactgtgtccttacatctcagccccgaagatcaggattgtgtgcaacttcggcccaaaggatgcatttccccagggttgaaagtttgagaaagaggctatattctgaagagttcttgttgtcaccatcaaaaggattaaaaagacgcaataaataagaaaacagcgtagttggggggcatgctccatttgagccagaaagccttggaaacttaagtgttctcaaacggaacgccatcctgctttgggggaacacggaggctgccttgcagtcacgtgatcgcacaacaccaaagggccacgcactctgatttcacctacttaactaaaagttgcagcaaaatccctattacaggccaggcgtggtggctcatgcctgtaatcccagcactttgggaggccgaggagggtggatcatttgaggtcaggagttggagaccagcttggccaacatggtgagaccccatctctattaaaaatacaaaaattagcccagcgtggtggtgcacgcctgtaatcccaggcaccctggaggttgaggtaggagaatcgcttgaacccaggaggcggaggttgcagtgagccgagatcacgccactgcgctcctgcctgggcgacagagtgagactccatctcggggggaaaaaaaaaaaaaaaaaaaaaaaaaatccctattacaaataaaagctgttgtgatccagactgcatatacctctgcgaatggaaccagaaccgtgaattccaatgcaaatcgatgcatcggcaccagacccgctgcactggatgtatctgcattgcagtcacccgagtacggagcacatcatagatgatctctgcaggttcgttgcccacataggaggcatagcgcaaatttcaaaggaacgaatacatcctggagcccaaacagctatctggttctgctgctggcctcctgacaagtaggtaagagagtcacattttatagacgacggacaccaaaaccacacatgaggagtacaagagtagctttatcatggatttagggctgtggttacaaggaagctgtaaggaataaaatgactcccatgaagacgtaccgtgcggacgagtggaaggagaaatttggccattacaaagacacaggaatatgttaagaagtgaggggcaggatgaaatcatctagggtaggtatttagagggagggcgccgtgcaaaataaaatcctcactatgaaacaaaggcggaggcaggaggctgcgttaggtggaagcagcggaggaaggagacgaaagggattgtcattttcatgtcgtggctttttagaagacagccatgtcctctactctgattctatcaaaatgtgttctcggggtgctggtaacgttcagccaacgaaataattcctatggcggcagtaggaataacaaaacgcagaagcgggaacgatgtctttttattcctccccagacgcaaacgtggatgcatgaggtttggtaacaggcaaagtcatctggttaacgtgactgatgcaaaaagtccaggcctgggcaaaaagaagtcactgggtgaatgggatggatcagactccctgtcctgagggggagatggtttcttgcagaacgaggtgaaggaggtggttctgctcagcagtcaacagtggccacatctccacctgcagcgacttgatggcttccgtgtccttttcgtgggtagccatgaccaaagactggagcagcagaaagagctcctcgggaagctggccgctgctctcctgcccgtggctgtcaaaagcctcccaggagtacttctccagggtctgggcgtgctccggcagcagcttggcgggcggtggttgcaggaggagcagcagcagcacgcgggacacctcgcagcggaccagcacgtccgagaaggcgcccagggcggcgggagagggcgccgccgagccggagttcggaggaagcagcgcggccggtagggcgggcgtcgccccgggcccgggctggggtgccggcggcgggggcggcggcagtgactgcaccgggtggctgccgtgctcccgcgccaggcgctgcatgcgcgtgaagaccgccagggcgccggtgtagtcgcgcgccagcagctggcaggaggcggcctcgccaagcgcctgcagcgcggccaggggcagctggggcagctggagctgggcggcgcgctggaagtgaccggcggcggcggccggctggcccaggtcgcgcagggcggcggccagctcgaggcagagggcggcggcggcggccggctggcccagctcgaggtgcagacgcaccgcggcgcccagggcgctggcggcggcctgcagcggctccccgtaggcggcggggcagaccaggcgctggcgcgcgtcgcgctcctgccgcaggaagaggcgggcggcctcggtgagggccagcgcctccccgggcccgtggaagagcgcctgctggcagcgcgccaccgccagctggcaccaggccgcgtagggcagacactcctgggcgcgcagctcccggcccagctgtccgaactgctcgccggcctccgccacgttcggcttccgcaggaaccgcttcttcagcttgttcgataccagccggtagcgggccaggaagtccccggcctcgggtcccgggccggcgccgccgccgcccaggcctgcagccgctgccgccatgctcgccgccccaagcacttcccgacgcgccgccgcagctggcgggcgggccggggcggggcgacgtgccctgcgtccccctcggcgggctgccgccgtgcccgcgccggctccccagcccgagcctgccccttgccctgatgaggtgcaaagagcgggatcggaggcggggcctggccgggctgtgagcggcgtatgcaaatcgagggtctcggggatgcggatccaagaccctgggaaggtacgcggggcctggcggggcaccagctgctgctagctcggctgcaatgcaagtggtctaggttgctaaaggcatcccacagcctctccatctgaacatgacccaaacgaaactcgtgaccctaattccatgtctgcgcatttctagactgttgtccccccccccccccgccccgactactcagtcctccgtcttccggtccagggccccttgccaagcaccgggtccacctctccgtccccaccccggttgccttagaagtccgtcctgtcgcaacactgcagtcatggtcttgaggcccacccgccccaacgaacaccatcatgctgaggactttcccgggcaggccctgacttgctcagaaccagcgggggtgtccccttcccacccagggccactcccctgcactgtcacccggagagactgctcctctgtgccatccctggctcccacccaaccccagacccccaccacctctccatccctccagctgtggaggtctcacaaccccccaacccatctcaccgcccccccacccccaccccaaggcaaagtgactgaagcgggcagatggcttccttgaaacattttattgacagaattaatgaaggcccaagactttggggcctgggttgtggggggagggtgtttaaggccgggggttcaggccgggggatttggggccgggtgggtggacgagtggacctgtcaggtcccaggggccgggtgtcagaagctagtcctcgccaggggccacttgagagatggtggtcgtgttgaaaagggtgctcagtagcctgtcgttgtgaaccaccatgtccagcagcaggggagtgatgttccgctctccgctgttctgggcctcgttgcccgccagctccgggaccttggccgtcaggtactcaataaccgcagcgaggtagaccggcgccgtgcgactcaggcgctgagcgtagtggccctcccgtagactgcgctccacctggctcactgaaaacgaaagctccgctcggacggtgcgagagcaggtccgcccccggccgccagcaccggaggaccctcggcgtctcctcctcctcggcatgctgggcgttgagtgtgctatctcggcttggcccagctaggcaagatggctctcaagaggacagttaccgcgtccagtactgtgtatcctagcgaccagggcccagcccctcattggctagggagccgagaccaatgggcacgcacatccggcgacgggcacgcatgtggtgacggcccctcacaagggacacacgtccgtcaggtgacctcatcactttcccattggcctcgagggagcaggcctgggcctagaagtggctggagggccgtgggggtggggtggggcggggcagggggaatcgcgctggtgaccctctctttgccagtgggaactttccctttctactggatgggaacaccgtgggaaagacaaaggggtgggcgaggggaggacgggtaccacgccttcacaatgttgcacatccatcacgaccacctagttccaaaacgttttcaacaccccgaaaagaaaccgaaacccctgtacctataagcagtcacttgccgcacgcctccttccacaccaccactaccagcccccacaccctcccacacacaccccctgcccccgcccatacacacgttcccgatagtccctggcaacccctagtccatctgctttctgtccatagaggttagcctgttctggagatttcctatagatggaattatacgaccaaatgtgaggccgtgtgtgtctggctgctttcacttagcgtaatggtttcatcagggtgcatccatgtagaggcatgaatcactacttccttcctttgaatgactgagtacgattctgttgtatgaataggaggccacattttgtttacccactcgtcagttgatggacaggttatttcccccttctggctattgtgagtggcactgccatgaccatctctctacaggtttttctttgaatatctcttttcagttcttttgggtctatttctagcagtcaaactgctggctcgtgtggtaattctgtttaacttattgaggaaccaccaaactgatttccacagcagctgtaatctttcgcattcccaacagtagtgcatgagagtcccaatttcttcacagcctcatcaaaacctgttttctgtttgcctcattttgttttgtttacagtagccatcctactgggtgtcaagtgctatctcatggtggttttcattcgtatttcccaaatggctaatgatgttgctgtggtttgagtgcatcccccaaattgtgtgtcttggaaacttaatccccaaattcacatgttgattggaggcgcagcctctgagacggtaattaggattagataaggtcatcggggtgagacccccaggatgcgactggtggctttataagaataggaagagaggcctgaaacgacatacacgctcttgccctctcgccgtgtgataccctctgccgtccccagatgccgggtcacttcccagtccccagaacggtaagaaataaatttcttttctttataaattgttcagtgtcgggtattcaattatggcaacagaaaacagactaagacatcttttcatgtgcttcttggccctctgtacctctgctttggaggaatgtctattcaagccctttgcccattttttaattcggttgattgtattttggctgtgggcttctaaaacttattcatatattctggaaaatagactcttatcagatatgtgacttgcaaatgtttctcccattcactttctggatagagccctttgttgcccaaaagatttacatttggatgtagtccaacttgccaaatgaaaagatatctgtggctttgcctttggtgtcatactgaaggagctgttgcctaatccaaggtcgtgcaaagttacatctccgttttcttcttagagttttatagtttcagcccttacatttagatctgtgatccattttgaattaattctttacatgatgtgaggtaggggtccaggggccttcttttgcatgtggctatccagttgtcccagcgcagtttgttgaggggattattcttcccctccacccattgaggggtgccggaactcttactgaaaataaactttacataaatatatgggtttattcctgactctgagttctgtaacattgacctaatgtatcgatcacgatggcagtaccacccttttcggattactgcggttttgtagtacgttttgaaattgggaagtgtgagtccttcaacttttttcttttctgagattgttttggctatctgagccccttacattttcttatgaattttaggatcagcttgtcagtttttacaaagaaggcaggttggattctgacaggcatcacgatgaatctgtatattgccttggagattatgggcatcttaacaatattaagtgtcccaatccgttaacacaaaatgcctttcgatttatttaggtcttctttaatttattttagcaacgtcttgaaattttcagagtatacatcttgtacacctttagttaaatttattcctcgacattttattgtttcgatgctactgtaaaatgaatcatttccttaatcttattttcatgttattcattgctagggtgtagaaatacaaccgactgttgcagattgatcttggatactgcaactttgctgagccgaatatgctttgctgagcatactcagacagggttggcatattagtccgttcctacactgctataaagaactgcctgagaatgggtaattcctaaagaaaagaggtttaattgcctcatggttctgcaggctgtacaaggcttctgcttctgggcaggcctcaggaaacgtgcaatcatggcggaaggcgaaggggaagcaagcaccttcttcacatgttggagcaggaggaagagagagagaacgcacgcaaagggggaagcgctgcacattttcaaacaatcatcagatcttgtgagcgctctatcagaagaatagcaagggggaagtccgcccccatgattcaatcacctcccactaggcccttccttcaacaggtggggattacaattcgacatgagatttgggtggggacacagagccaaaccgtctcagttttttttttttttcttttgttggactctttagtgtcctctatataagaacatgccatctatgcatctatgaatagagatggttttacttgttcctttccgatctggatgccttttatttctttttcttgactaattgccctgactagaactttgagtacgatgttgagttacaagtggcattcctgatcttagggggaaatcaaccagtctttcaccattaagtatgatattatctctgggtttttcatggatgccctctatcaggttgaagaagtttctttctgttcctggtttgttgaatttattttcatgaaagggtactgcgttttgtcaaatgatcctttttgtacatgattaagatgaccatgagccccctcccccgcccccgctccgccatgcattctgttaatatggtgtattatataaattgattttcacatgttgaaccaaccttacatttgtgggataaatcctatttggtcatagtgtataaagagtggtcaataaacatttcgttgaaagaataggagtggatctggcaagcttcttggaggacaatgtgtgtgttaaagaatctgtagcatgatgagaagccaaggcaccggtgggaggaggggagttgcaaccaattcattaaggctggagagtacgatgccagtggagcagtagtggttgatgtggctgggaaagaggtaggcaggagccaagacatggaggttctattatgccatgctcaggttttagaataccctgtaggctacactgaacccactgtggtctttcagcttgggagtgacgtggtctgatttgcctctagaaatatcaccctggaagctgtgtggagaatagaacagagaggattgtgtgtggagaatagaacagagaggactgagattggaattagaaagctgctgtattataccagtcaagaaatgacagatatctcaactaagacaatggcattggtagataagactaggggacagagtccataaaaagtttaggtagtaaaatggcacacagtagacactcactacatattactcatactggtgaacctagctggagacatgataattcatgtgctcattcttcaaaaaatattgaagggtagtgccaggtatactgtgttaagcattgagacaacaccaacgagaaatattctgttgtataaataggccacattttgtttatctactcatcagttgatgaacagttcattaaatgatttccatggcaggggaggtaaatgttgtcctctatcctcttagattctccagctaggacttaaataagatagattaacaaaagaaaagcatacaaaattttatttggcattttttacatgtacatgggagccctcataagaaatacgaagactcaagtgattaattacagctgaatacttacatactagggtgggaaaagtatggtaaattgtgaaaacataacaagacattggggtttgggctaggagagttaattgtggaaaagtcactaagaaggtaagagttgtgtaacaaggttttttggtgcagctttccctcaagcctggactccccatctctggcaataagaatgtgtttcttcttcctggtatacagataatacctttcacatcagagtttcatctcttcctttcatgaaaaaaaaaggaaggtcagtgtgcccttcttgcatctgctactttcaagtgcctttaaacacaaaataatcaatatgccaaagtggcatattttgaggtggcatttgatcccctacattactgattggatagtgtgaatagtgctgccatgaacgctcctgtacaagtgtttgtttgaacagatgttttaaattgcagacgctcctcaacttgggatggtattatatcctgataaacccattgttagttaaaaccattattagtgtaaattcatttaatacagctatattagtccattctcacactgctataaagaactacctgagacttggtaatttatgaagaaaagaggtttaatggactcacagttctgcaggcttaacaggaagcatgactgtgaggcctcaggaaacttacagtcccagcagcaggtaaaggggaagcaagcacgccttaccatggtggagcaggagagacagagagtgaaggacggaaatgtcatacacttttaaaccatcagatctcatgagaactcactcactgtctcaagaacagcaaggggaaatccacccccatgatccaatcacctcccaccaggcctctcctctgacacacggggattacaattcgatgtgagatttgggtggggatacagagccaaaccatatcagcggctaacctaccaatcatcataatttagccaggcctaccttaaacatgctcagaacacttacaattaggctacagttgggcaaaatcatataacgtaaagccaaatttataatgaagtgttgactatctcacgtaatttattcaatattgcactgaaagtgaaaggcagaatggttgtatgtgtactttaagtacttttatgcatatggattctactgaatgcatgttgctttcataccatcataaagtcaaaatattgtaagtccaaccattataagctgggaaccatccatatttgaggtacatacccatgaatatatttatgggtttatttcttgcttcttaattctattccatttatatatatgtctgtccttatgccagtaccacaaagcattgataactgtagctttatacgaagttttgaatttgggaaatgtgagttatccagctttgttattttttaggattattttggctatttgaggtcttgcacaattacacatgaattttaagattggcttttccatttctgccaaaaaaaaaatggccattgggattttgatgcagattgtattaaatctgtagatcactttgggtagtactatcatcttaataatattgtcttccaattcatgaacacaggatatattttcacttctttatgctgtctctaatatctttcagcaatgttttgtagttttcagtgtacaagtcttttacctccttagctgaatttattcctaagtattttattctttttgatgctattttaaatagaattattttttattttgttaatttcatctcagattgttcattgctagtgtgtagaaatacaactgatttttgcacgttgatcttatatcttgcaactttgctgaattcgtttattagctctatagtgttttgtggattcttcggggttttccatacataagctcatgttcatctgagaataagatagctttacttattccttttcaatttggatgccttttatttctttttttcctaattgctctggctaagacttccaatacaattttgaatagaagcagtaaaagcaggcattcttgtctcgtttctaatgttagggaaatatctttcagtcttctaccattgagtgtgatgttagttttgggtattttatgaatgctctttatcatgttgtggattttctcttccatttctagtttgcttagtggtttttttttttttttttttttttggtcatgaaaaggtgctcagctttatcaagtgatttttctgcatcaaccagaatgaacttgcaggggtttttttccctatattttattaatgtggagttgactgggggattgattgtcttatgttgaaccagtcttgcattattgggataatttccacttgagcatgggctataacctttataacatgctgctggatttggtttgctaatattttgttgaagatttttgcacctagatgcataagggaatattatactcacatattcaattacatgcaatttgtaattttcttttcttgtgatatatttgtctggctttgatatcaagatatggtggcctcatagtatgagttgtaaagtttactctccttttctgtctcttggaagagtttaagaaggattaatgttaatccttccttaaacatttagtagaatttaccagtgaggccttctagcacaatgcctggcacataatatatggaatctaggatttgtatagtcagtcattaactatttgttgaattaataaattgtctccccaagcaggtttctaatcaaggcacaaagattgagtaacgaatgaaggcaaagccaatgtatacagggtattagttttctaatgctggggtggcaaattaccacaaacttaatatggcttaaaacaacacaagtttattatcttacagttcgatagggcagaagactgacccaagtcttactgggctaaaatcaaggtgtcatcagggctgcatttctttctggaagctctagaaaaggatcctttttcggtcgcctgtagtcccagctactcgggaggctgaggcaggagaatggcgtgaacccgggaggcggagcttgcagtgagcggagatggcgccactgcactccagcctgggcgacagagtgagactccctctcaaaaaaaaagaaaaagaaaaggatcctttttcctttcttttccagcttctagaggccacacacattcattaactcatggcttccttcctccatcttcgaagccagtaacattgcacctttgtgactattcttaagtagtcacgtctccctttgactctcctcttctgcctctctctctcactttcaaggcctcttgtgattacattgggccgacctggataatccaggatattctccctattttgacatcagctaattggcaaacttaattccatctgcaaccttaaatccctcttgccatgcaacataacacagtcaaatgttctggggattaaaatgtggacatcactgagagatcatattcttcctagcacatacggtttagtcacaagttaatgatcaacatttattagctatataatactcttaagttcaacataaactttttggatgctgataaaacggaatggcattttacattgatatatacttcatttcaaaacttcttctacttctcaatgattattctgtagcaacaaatttcttttaaatcagaaatttggaaacataacgagacctatctcaaatcaaagatgactatccccttttggagtcagactacacattcattattttagtcaaaatgagacataaaattcaggcccccaagagctgccagtacccacttacgcaggaggtagctagacgaaacaggtagctttctacaaatgattttgcaccatcccaccccagagaggtggtttggagtgtttacttattacctgggatttaattatactagctcttgcaaaagccaaatctaaaggccataaatagaaggtcaaattttctcctatatagaaaggagagcagcagagaaaacaaaatccttggtaaatctttaaacaaagttatatggtttgaatatgttattcattctattttaaccccccaatacagatatatttataaaaaagaatattgtgatttctggtataacttgtttaggaacaaagccacaaatttattaatattttctattccctgggaagaaaaaaatgctacatggcagaataattttttaaaatttccagccgggcacggtggcttatgcctgtaatcccagcactttgggaggccgaggtgggcggatcacaaggtcaggagattgagaccatcctggctaacacggtgaaacaccgtctctactaaaaatacaaaacattagctgggtgtggtggtgggcgcctgtagtcccagctactcgggaggctgaggcaagagaatggcgtgaacccgggaggcggagcttgcagtgagccgagatcgcgccacggcactccagcctgggcgacagagcgagactccgtctcaaaaaaaaaaaaaaaaaaaaaattcccatgatactaaactgatgtgtgatcatataatagacttacactgatacctattttagtgtattcaagcagataaaaaatcccaggtgttctatgagtgatatcattttcagtatttcttatgctgtatgccatggtttaaatctaggcctttcgaattggcattactaccatatttctcaaactgtattccctttctcttgaatatgttatgtaattttgtccagaacccagacatgtcaaggtgtcaaatcccacgttttggatactaacgtgtctcattaattcatacagtgggatcattcattaatgcccacattatagactctctctctctctacacacacacacacacacacacacacacacacacacactacattcttagaagatcattctgagaccagggtggaggataggctgtgcattcccagtactctttcacagctgactgtgtcctctgccagtgttttcaaactttactgcttatgaaacagctaagggtcttattaaaatttagattctgattcagtagaactgacatggtgcccaaggaactgcatctcttttaaaaaatctttatttaggtataattgacaaaagttgcatatatttaagaggtacaacttgatgttttgatatattttgtttttcatatatgatgtttgatacattgtgaaatggtcaccacaagcaagctaattaagatatatctatctctttgcctagctacctttttttgtggtgagaacatttatgacctactcttttagcaaatttcaagtatacaatattgtttactatagttactatatcgtacattagatctccagaactaatttatcttgcataattgaaattttgtaccctttgatcaacatctccctgtttcccccacaccacagtccctagcacctaagattctactgtctgcttttatgagtttgaccatcttagattccacatatgaggtcatgaagtatttttctttcagtgtctggcttattacacttagcataatattttccaggttcatccatgttatcacaagtgggaggattttcttctattttaaggccaaataatattttataattgtgggaatattccatcagatatatatatatcagattgtctttatccctccatccatcaatggacacacttaggttgtttccatatcttgactattgtgaatactgttacagtgaacatgggagtgcagatattcaacatactgattttgtatcctttggatatataacagaagtgagattgccagatcacatggtattcatttttagtttttttgaggaacctctatgctgtttttcataatggctgtaccaatttatttttgcagcaacagtgtacaaaggtttccttttctccacattaccaccaacatttgtcatcttttgtctttttgataatagctatttgctatggtttgagtgttttccccaaaaaacatgtgttggaaacttaattcccaatgcgacagtgttgggaggtagggccgaatgggagatgtttaggttatgaggactccaccctcatgaatggattaatgccgattacaaaagcacctaaggctgtgaatttgaattgctctctcttgccctctttttgcccttctgccatgttatgatatagaaagaaggcctttgccagatgctggcctcttgatcttggactgcccagcctccagaactgtgagccaaatacatttctgttcactacaaattactcagtctgtggtattctgtcatagcagcataataaattagagtccataataagttatagtccataacagactaagacactattctaatagatgtgagggaatatctcattgtgttttgatttgcatttccctgtgggttagtgatgctgagcatcatttatctgttggccttttatatttcttcttttgaaaaattctatttgggttctttgcccatttttaattgggttgtttcttactaatgagttgtttgagtttcttacccattatcagatatacagtttgcaaatattttcatccattccataggttgtcttttcactctgttgattatttcttttgctgtgcagaaagtttttagtttaatgcaatcccagtttctatttttgtttttgttgcctgtgcttttggtgtcatataaaaaaattattgcccaaatcaatatcaggtagcttttttcctgttttcttctaggagttttatagtttcaggtcttatatacaagtgtttaatcaattttgagttgaattttatgtatagtgtgagaaaagggcccaatttctttcttctgcatgtggatattcagttttcccaatatcatttattgaagagactctcttttccccgttgtgtgttcttggcacccttgtcaaaaatctgttgactgtaaatgtgtgaacttatttctgggcttttctattctgttcccttggttgatgtgtctatttttatgccagtaccatactattttgattactggagacttgtagtatattttgaaatcaggaagtatgatgcctctagctttgttcttcttgcttaagattgctttgccaggctgcatgtggtggcccacgcctgtaatcccagcactttgggaggctgaggtgggtggatcacttgaggtcagaagtttaagagcagcctggccaacatggtgaaaccccgtctctactgaaaaaatacaaaaattagccaggtgtggtagcaggcccctgtgatcccagctaatctggaggctgaggtggagaatcacttaaacctgggaggcagaggttgtagtgagccaagatcgcaccactgcactccagcctgggcaacagagcaagactctgtctcaaaaaaaaaaaaaaaagattgctttgcctccttggggtcttttgtgatttcatattaattaaaattttttttttatttctgtgaagaacaccattgagattttgatagggatcacatcaaatctatagattactttgggtagtgtggacattttaacaatactaattcttccaatctaggaatatggaatatcttttatttatctgtgtcttctttaatttccttcataaatgttttctatattttcattgtacaagtctttcatttctttggttaagtctattcctaagtattttattcttttgttgctattgtaaataagattattttctaatttcctttgggatattttatagtgtatagaaacaccactgatttctgtatgttgattttgtatcctgcaactttacagaattcatgtattagttctaacaatttttttttgagtctttagagttttctacatgtatgatcatgtcatctgcaaaaagagataattttactattctcttctatttggatgctttttattttatttattttttaaattatattttaagttctgggttacatgagcagaacatgcagttttgttacataggtatacacgtgccctggtggtttgctgcacccatcaacccgtcacctacattaggtatttctcctaatgttatccctcccctagccccccaccccccaacaggccccagcgtgtgatgttccactccctgtttccatgtgttctcattgttcagctcccacttatgagtgagaacatgcagtgtttggttttctgatcttgtgatagtttttgagaatgatggtttccagcttcatccatgtccctgcaaaggacaggaactcatccttttttatggctgtatagtattccatggtgtatatgtgctacattttcttaatccagtctatcattgatggacatttgggttggttccaagtcttcgctattgtgaatagtgccacagtaaacatacatgtgcatgtgtctttattgtagaatgatttataatcctttgggtatatgcccagtagtgggatttgctgggtcaaatggtatttctagttctagatccttgaggaatcgccatactgtcttccacaatggttgaattaatttacactcccatcaacagtgtaaaagcgttcctatttttccacaacctctccagcatctgttgtttcctgactttttaatgatcaccgttctaactggcgtgagttggtatctcattgtggttttgatttgcatttctttaatgaccagtgatgatcagcattttttcaaatgtctgttggctgcataaatgtcttcttttgagaagtgtctgttcatatcctttgcccattttttgatggggttgtttgtttttttcttgtaaatttgtttaagttctttgtagattctggatattagccctttctcagatggatagattgcaaaaattttctcccatcctgtaggttgcctgctcaccctgatgatagtttcttttgctgtgcagaagctctttagtttaattagatctcctttgtcaattttggcttttgttgccattgcttttggtgttttagacatgaagtctttgcccatgcctatctcctgaatggtattgcccaggttttcttctaggatttttatggtcctaggtcttacgtttaagtatttgatccatcttgagttgatttttgtaaaaggtgtaaggaagggatccagtttcagttttctgcatatggctagccagttttcccaacaccatttattaaatagggaatcttttccccattgcttgtttgtgtcaggtttgtcaaagatcatatggttgtaactgtgtggtgttatttctgaggcctccattctgttccattggtctgcatatctgtttggccccagtaccatgctgttttggttactgtagccttgtagtatagtttcaagtcaggtagcatgatgcctccagctttgtccttcttgtccaggattgtcttggctatgagggctctttgttggttccatatgaagtttaaagtagtgttttccaattctgtgaagaaagtcagtggtagcttgatggagatggcattgaatctataaattactttgggcagtatggccattttcatgataatgattcttcctatccatgagcatggaatgtttttccatttgtttgtgtcctctcttatttccttgatcagtggtttatagttttccttgaagaggtccttcacatctcttataagttgtattcgtaggtattttattttcttagtagcaattgtgaatgggagttcactcatgatttggctctctgtttgtctgttattggtgtataggaatgcttgtgatttttgtacattgattttgtaccctgagactttactgaagttgcttatcagcttaaggaggttttgggctgagatgatggggttttctaaatatacaatcatgtcatctgcaaagagagacaatttgacttcctcttttcctatttgaataccctttattgctttctcttgcctgattgccctggccagaacttccaatactatgttgaataggagtggtgagagagggcatccctgtcttgtgccagttttcaaagggaatgcttccagtttttgcccattcagtatgatattggctgtgcgtttgtcataaatagctcttattattttgagatatgttccaccgatacatagtttattgagagtttttagcatgaaggggtgttgaattttatcgaaggccttttctgcatctattgagataatcatgtggtttttgtcattggttctgtttatgtgatggattatgtttattgatttgcatatgttgaaccagccttgcatcccagggatgaagccaacttgattgtggtagataagctttttgatgtgctgctggatttggtttgccagtgttttattgaggatttttgtatcgatgttcatcagggatattggcctgaaattttctttttttgttgtgtctctgtcaggttttggtatcaggatgatgctggcttcataaaatgagttagggaggattccctctttttctattgtttggaatagtttcagaaggaatggtaccagctcctctttgtgcctctggtagaatttgtctgtgaatccgtctggtcctgtactttttttggttggtaggctattaattactgcctcaatttcagaacttgttataggtctattcagggattcaacttcttcctggcttagacttgggagggtgtatgtgtccaggaatttatctatttcttctagattttctagtttatctgcatagacgtgtttatagtattctctgatggtagtttgtatttctgtgggatcagtggtgatatccccaatatcattttttattgcatctatttgattcttctctcttttcctctttattagtgtggctagaagtctatctattttgttgattttttcaaaaaaaccagctcctggattcaatgattttttgaaggtttttttgtgtctctatctccttcagttctgctctgatcttagttatttcctgtcttctgctagcttttgaatttgtttgctgttgcttctctaattctttaattttgatgttagggtgtcaattttcaatttttcttgctttctcttgtgggcatttagtgctgtaaatttccctctaaacactgctttaagtgtgtcccagaaattctggtacgctgtgtcttcattctcattggtttcaaagaacatctttatatctgccttcatttcattatttacccagtagtcattcaggagcaggttgttcagtttccatgtatttttgtggttttgagtgtgtttcttaatcctgagttctaatttgattgcactgtggtctgagagactgtttgttatgatttccattcttttgtatttgctgaggagtgttttacttcgaattatgtaatcagttttagaataagtgtaatgtggtgctgagaagaatgtataatctgttgatttggggtggagagttctgtagatctctattaggtctgcttggtccagagctgagttcaagtcctgaatatccttgttaattttctgtctcattaatctaatattgacagtggggtgttaaagtatcccactattattgtgtgggagtctacgtctctttgtatgtctctaagaacttgctttatgaatctgggtgctcctgtattgggtgcatatgtatttaggatagttagctcttcttgctgcatttttccctttaccattatgtgatgctcttctttgtctcttttggtctttgttggtttaaagtctgttttatcagagattaggattgcaactcttgcttttttttttgctttccatttgcttggtaaatattcctccatccctttattttgagcctatgtgtgtctttgcaagtgagatgagtctcctgaatacagcatactgatgggtcttgactctttatccaatttgccagtctgtgtcttttaattggggtatttagcccatttacatttaaggttaatattgttatgtgtgaatttgatcctgtcattatgatgctagctggttgttttgcccattagttaatgcagtttcttcatagtgtcaatgttctttacaatttggtatgtttttgcagtggctagtaccagttgttcctttccatgtttagtgcttctttcaggagctcttgtaaggcaggtctgatggtgacaaaatccctcagcattcggttgtctgtaaagaatttcatttctccttcacttatgaagctttaagaggtttaattgactcacagttctgcatggctgtcccataagtcccatgttctttcctcaggaaacctacagtcatagcagaaagggaaataggcacatcttacatggcagcaggcaagagagagtgtgtgaaggaggaactgtcaaacacttataaaaccatcagctctcataagaactcactatcaggagaacagcgtgggggaaaccatccccatgatccaatcacctcccactaggtccctcccttgacatgtgggcattatggggattacgattcaaggtgagatttgagtgggaacatagagccaaaccatatcagtatctaaaaggaaaaaccttcagtttttccacatttggttatgatatcagctgtgagcttttcctatatggtctttattgtgttaagttccttctgtatctatcttgctgaaagtttttattatgaatggatatctagttttgtcaaattctttttctgtattgatcgaaataatcatgtgtttttcatctttcattctgataatgtggtatatcacattgattgatttgcccatgttgaaccatccttgcatcctagggataaataccacttgttcatgatgaatgatccttttaatgtgctgttgaatttggttggctggtgttttgttgaggatttttgtatccgtgttcatcagggatattggcctgtagttttctttcttttcttttcattttctttttctttctttttttttttttttttttttgagacagagtcttgctctgtcacccaggctggagtgcagtggtggtatgatcttggctcactacaacctccacctcctggattcaagcgattctcctgcctcagcctcctgagtagctgggactactggaacatgccatcacacccagctaatttttgtatttttttagtagagatgagttttcaccttgttggccaggctggtctcgaattcctgacctcaagtgatttgcctgcttcagcctcccaaagtgttgggattacaggcttgagccaccacacctggcctggcctgtagttttcttttctagtgttgtttttgcctggatatggtatcagggtgatgttggctaataaattgtattttgaagtgttctctcttgtattttttggaagagtttaagaaatactggtattaatacttcgttgaatgtttgatggaattcatccatgaagccattggtcctgggcttttctttgttggaaggtttttgattactagatttaatatccctatttgttgttagtctgttaaggctttctatttctttgttattcagttttggtatgttatatgtttctaggaatttatccatttcctctaggttaaccaatttgttgacacttataatagtcccttatggttctgtctgtttctgtgacatcagttgtagtgtctcctctttcatttatattttatttatatgagtcttctctctttttttcgtagtctagataaggacttgtcaattttgtttattttttcaaaaaaatcaactcttagttttgtcagttatttccaattgtttttttattctcttttttatttatttctgctctagcatttattatctcctttgttctgctacctttgggcttagttttttttttcttctttttgtagttcctggaggtgataagttgggttgtttatttcatatgtttcttctttttaaatataggcatttattgctataaatttccctattagtatgcttttactgcatcctttaagttttggtatattatcaagattttggtttcttctgtgacccaatggtcgttcaagaatgtgttgtttagtttccacatatttgtgaattttcgtgttttcttattgttattgatttgtagtttcaatccattgtggtcagaaaatatacttggtatgatattaatcttcttaaatttattatgacttgttttgtgacctgaaaggtgatctgtcctgaagaatgttttgtgtgtgcttgataattctactgttgggtggaaagttctgtatatacattttaggtccattgggtctattttattcttcagttctgttttgtccttattgattttctgttgggatgatctattcattatagagagtggagtattgaagtcaactatattatattgttatctatttctccttccatgtctgtcaatgtttgctttatatatttaggtactttcgtgttgggtacatatatatttataattattacatcttcctgttcaagtgacccttttattatataatgaccttctatgtctcatgtcacagttttttacttaaagactattttttctcatacaagtatagccacccctgctctcttttggttacagtttgcatggcataactttctccaccccttcactttcagcctatgtatgtccttaaatcaaaagtgagtctgttatcaacaacatgtagttgggtcctgtttatttttgtttcttacttcccatctctgaattgttggctttttaaaaagcccattcagttactctgtgtcttttgactggggagtttagtcaatttacacttaaagtaattattgataggttaggactttctgttgccattctgttaatagttttctgttttgtagttttcttgttcctttcctctttttctttctttgtggtttgatgatttttgcttggatgtgttttgattcttttctctttatcttctgtatatctactgtgtgggggggcggtcgggggggttaccacagggatcaaattgaacactttatagttatggcagtctgttttaagctgacaacaccttcaatcacatacagaaactctatactttactcattccccccgccacaactttatgtaatcgacgtcatattttacttccttctatattgtgtttccattgacaaatttctgtcactatagttactattactatttttgtcttttaatttataaattaatattaatagtgatttataacaatcattatagtgttacaatagtctatgtttctctttatatttacctttagcagtgaaaggattcatatgcttttgtgttactgttttttttttatttcaacttgaagaactattagcacttcttataaggcaggtctcatggtgacaaaccccctcagtttttgtttgagaaaggctttatctttgtgttcattcttaaaggacagtttttccagataaagtattgttgattggatttttttctctcagtactttgaatatatcatcccactctttcctgacctgcaaggtttctgctgagatatccactcatagtcttatggagctcccctataggtgacaattcactttcttcttactaccccaaaattctcttttgtctttgttgaaaatttaattataatgcatctcactgtagacttctgtgggtttaatgtatttggttatctttgggcttaatgaatccagatggcacttcccctccatagatttggggagttctcacctattatttctttaaataagtttcctttctctctctcttctccttttaagatttctataatgcatctatcattttgcttgatgatgtcccataagtcctctgttcttccttcactctttctcattgttctttttattccgctaactagataatttcaaatgacttgtcttcaagtttacaaattctttcttctgaatgattgagtctgctattaaagatcgctattaaattttttagttcagtcattcttcagctatattcagcaatattctttagctacaggatttttatttggttcttttttatggtttttatttctttattaaacttctaatgttgttcatgtattgttttcctcattttgttagtcgtcttcctgtatcctcttgtagctaattgagcttctttaaatgattattttgaattctttgtcaaaaatttcatgaatctccatttcttcagggttggttactggagctttattagttccctttggtgatgtcatatttgcctgattcttcatgatccacatagcctagcattggtatctgtgcattggagtgagctgacacctcttctggtctgaagttgggtactcagacaatgggcccattaccagggctttggataggtgtagctctcactgggtccttgagtgggcaggactgcctgcagaccatgatgcagtgggcctggagctgggtcaaagggctgcttcagggtccccacttgggcccacagtcagtgggcctgttatgggggcacaggtaagtgtggattcaggcaggactgtctccagaacatggtacagcaagactggagttggctcacagggttacttctgagtccacagtcaggtctagttggtgggcctgcttccagaggtggactggcatgactcccacctgtttcctaagtaggcaaaacttccccaagaccatggtagtgtggtactgaagctgctttaggtacagggctgcttcagagtccacagttgggagccctgttactggggttgccaatgggagttgctcctcccagattcctgggcagatagggatagtggtaggaccacatacaaacaactctggagctaagtccccagggtggtgggctgcttctgggtccacaaccagaactacagttgacaggcctgccgctagaatgtgggcctgccttattaaagtattcatctttgttcttgagctctaccagggtttctcaacctcctacctgaatcccaaggctcccacaaagacacttttgtccatagatcattgtcaaattattgttcctgtgggggaacaagagctagggacctcctatcccatcaactcactgataccgttctcctgatgctgcattttgaattgccctcaggtgatgctgctactcctggtctgtggaccatgctggagtagcagagcccaaatggcttcctcaacttttatgagccttttacaggaactcaaagtagaaaataacttcacttgccccagacctaataatttcctttgttcccacttcttcttggtgctttcctcctttgtgtctaccatcgtaacatccatctaaccatagttgtcttatgtagatgttggatgctgttgagaaacgcacaaagcaaattagaaggaagatatgattgacagaaattgctttttactctgtattcactttccatgtatttgtgctaatctctccatacaggtcttctttggcaatgtggattcatctgggataaaacacaatatttttaaccctccaattattgctcgatacatccgtttgcacccaactcattatagcattcgcagcactcttcgcatggagttgatgggctgtgatttaaatagtaagtgccaagtcatcccatatccttcttccctcaaccatgggtagggtgactaactgttctagttatcctgagactgggggaggggttcccggtatcaggacacaaaattgtcagtgctaaaaccagcatagtcctgggcaaacccagaaataccattcaacccagcagtcccatcactgggtatataatcaaaggaatataaatcattctgtcataaagacacatgcacgcatatgttcatttcagcactattcacaatagcaaaggcatggagtcaacctaaatgcccatcaacaacagattggataaagaaaatgtggtacatacataccatggaatactatgcagccataaaaaagaatgagatcatgtccttttcagcaacatagatgcagctagaggccattatcataaatgaactaatgcaggaacagaaaaccaaatatcatgtgttctcataagtgggagctaaacattaaatgcacatggacacaatgatggacactcaggaggggagaggttgggaggggggtgtgggttagaaggttatgtattgtgtactgcactcactacctgagtgaggggatcattcatacaccaagcctcagtgacatgcaatttacccatgcaacaaacctacccatgtacccctagaatctaaaataaaagtagaagaagaaaagaaacaaagaaaattaaagagtcacacaaagtgggaagagctggctggaaaacagatagcaataacagaattggccgggcgtggtggctcacacctgtaatcccagcactttgtgaggccaaggcgggtggatcacgaggtcaggagatcaagaccatcctggctaacatagtgaaaccccaactctactaaaaatacaaaaaattagccgggtgtggtggtgtgcgcctgtagtcccagctactcgggaggctgaggcaagagaatcgcttgaactcgggaggcagaggttgcagtgagctgagatcatgccactacactccagcctgggtgacaaagcgagactccatctcaaaaaaacaaaaacaaaacaaaacaaaacaaaaaaccaataacagaatctgtgcaaaagttaaaacctgagaaatgatattatgatgacagtagccctagaatatcagtggaagctgctcagtataactgaggctgaagcatgtccttgtgataaccttcttttttcttttctttgaggttgcagcatgccattgggaatggagagtaaagcaatatcagatgcacagattactgcttcatcctactttaccaatatgtttgccacctggtctccttcaaaagctcgacttcacctccaagggaggagtaatgcctggagacctcaggtaagaggcaacagatttactgtttaactgactcagagcagtggttggggaaaaaatcggggaaggccttgactgtttcttctgaggtatttctgtcaactgttagttctaaaaagtgtgtcaaggaagtttggttatgggcagacaaccacacaggcatttgggggaaatgatctctaattgaacctcctggaagaagaatctctatatctagtactgagctaatatctgtcaaagaattgtagaagctaaagtccattttacagataaatatcaacaattagctttctttccaggtttctcattacatcaatgaaaagtaaacatttactgcacatcttagtatccctaggatgagcctagggatacaaaggtgaattgtgaaaaattttggccctgaagttgcttagagttgaataagagagactgactagccaatagaaagtggaggctgggtgcggtggctcatgcctgtaatcccagcactttgggaggctgaggcgggccgatcacaaggtcaggagttctagatcactcttttgctgaggcaggataatcgcatgaacctgggaggcggaggttgcagtgagctgagatcatgctattgcactccagcccaggcaacagtgcctgactctgtctgaaagaggcagagagagagagagagagaaagaaaggaaagaaggaaggaagaaaaagaaagaaaggaaggaaggaaggaggccgggcagagtggctcacgcctgtaatcctagcactttgggaggcctaggtggcagatcacctgaagtcaggagttcaagaccagcctggccaacctggtgaaacctcatctctactaaaaatataaaattatctggacatggtggtgggcacctgtaaccacagctactcgggaagctgaggcaggagaatcggttgaactcgggaggcagaggttcagtgagctgagatcatgccattgcactacagcctgggtgacagagcaagactccgtctcaaaaaagaaagtagagtgagaagtgctgtggtatggttaagagggatttgggaatttctgggagtaaatggtgaccaagaggctactagtccaactctattgccctcaggtgaataatccaaaagagtggctgcaagtggacttccagaagacagtgaaagtcacaggagtaactactcagggagtaaaatctctgcttaccagcatgtatgtgaaggagttcctcatctccagcagtcaagatggccatcagtggactctcttttttcagaatggcaaagtaaaggtaagctggtctccttggaaagaaagaaagaaagaaaaaaaataccacctctcctagagcttaacataacataaaaaggttgatatatgaccaaattttcagagcaaaatttattaagtacctatggtagcaagacattgtaaaaggcattctgagagaacacagtgactttaagaaaaaggtaaaatactgagaaaagggcagagtagatccaagagttaattctcctcatcagcaccttgattcccaagcctttttgacctttaagtttagtggtccaggaagtcttcattcttaatctgggtttgctggataattcaacaaattgtcctgattaaaagacatgacataaagtcttatcaccccatgagtaatgggggaaggaatagttcctctctttggtattttttatattcttttttcaccaagaattaaccatgatgtggtccttaccaatctctctaatacagtctcttgccacttggctctttaagctccatccatactaagaaattctcaggtcactaaatacagccattatatctcataccaggcttttaaatagatactatttcttctacctggaacatttttctagctaccctctactgccactttcacctgactcattcgttaagtctcaggtaaacatcatgtccaagaagaattcccttatccatcaaggctggatgaaagacttcaccaaactggcagtttggtgaactgaagtctagacattggatattctagaagaaaaattcccatttaaaaaaggttatatctctgattagtgccacaacatgatgaactttcaaaatatgctaagtgaaggccgggcgcggtggctgatgcctgtaatcccagcactttgggaggctgaggcaggcagatcacgaggtcggtaaattgagaccatcctggctaacacagtgaaaccccatctctactaaaaatacaaaaaattagccaagcgtggtggcgggtgcctgtagtcccagctactcgggaggctgagacaggagaatggcatgaacccgggaggcagagcttgcagtgagccgagatcgcaccactgcattccaacctgggcaacagagtgagactccatctcaaaaaaaaaaaaaaaagaaaatacgctaagtgaataggccagacataaaaggatagatattatatgattctacttatatgagtgtgttagtcagggatatccaaagaaatagaaccaataggagattctgtctgtctgtctctctctctctgtctctctggatgagctaaactgttttagttcaagactgaaagcaggaaaaagctgatgttccagtccaaaggcagacaggcagcaagaatactttcttacttggggaagactcagtctttttgttctattcaggccttcaactaattggatgatgcctcccacattagggagagcaatctgctttactcagtctactgacttcgatgttaatcccattcaaaaacaccttcacagaaataaccagaataatgtttgagtaaatatctgggcaccttatgaccaagtaaagtagatacataaaattaaccatgacaagtccaccccttgtcaatgtagcacccatcatacacatctcctttatctctaagtagagacaaaaatgaggtcataattccacctaacatgatataacaaaacttggctggtattgataactaccttcttctactacccattctgtattgactttgccttcagcaagcatctcagctgattgtggttctttacctgatgaggtgacccaaacctttattcctgaagagcctgggccactagtagtcctgcatggattgggttgctgtagtttcccattgaccagaatcatagggcctggtaatactaagagacactctaagggatctattgtattccagacacactcttccatacctccattgtgaagcagtagttcagtttccttccaggaaggacaaaacgctgccccttccatgatgaacatattccaatgtaatcaacctgctgccagatagctggctgatcatcctgggaaatactgccatactgaggactctgtgtttgtctctactgctggcagattgggcacttagcagtggccatagccaggtcagccttgttgaatagaagtccatgttgctgagcccatgcatagcctctatccctgccaccatggctactttgttcatgagcccatcaggcagtgacataggtggctgagtaaaaaggatgactggtatccacagaacaggtcatcatatctactttttttttgagatggagtcttgctctgttgcccaggctggagtgcagtggcacaatctcagctcactgcaacctctgcctcccaggttcaagcatttctcgtgcctcagcctcccgagtagctgggactacaggcacgcatcaccatgcctggctaatttttgtatttttagtagagacagggtttcaccatgttggccaggctggtcttgaactcctgacttcaggtgatcctcccgccttggcttcccaaagtgctgggattacaggcgtgagccactgcacccggcccatcatatttacttgattattgaaatccttatctgctgaggtcacccttcgttgagcactcacatgggacataaatatattcacatcctttgcccattcagagagatctgtccacatacctcttccccaaatttctttgtcacctgttttctaatcatgttccttccaagtccctatctggacaaagcactgactacagcccattacttgacatataattgcacacctggccatttctccttctaagcaaagtccacaaccaggtacactgcctaaaattctgcccactgtccttcatgggtatctcagatcgggactgtccacttttgtgtagtacctgcatatcgtgcagaaccgtctgtaaaccaggcccaagactcctcttcctctgtaaactgatcatagggaactcccaatggggccataagtgcaggctgggagagagaaggcagggtagcagaaacaggcaccatggacatttgggctacttcttcatgtaatttacatgtgttttcagtacctgctcagacatgatcatgtatataccacttccatttgatgatggagtgccattgttcatacccaactttatggcttggtgggtcagataacacctagttcatgatgggcagttcaggtcacatggcaacttggtggtctgtggctaagcattcagtatctactaaggcccagtagtaggccaagagctatctcacaaaaggagaacagttattcacagaggattacaggaggatttctcactacagtagcccctgctccataggtcagggaaccaatgtgaagatcctgctagctgctcaatatatctgttccaattacgcattccaggactggggaaataaccacaagatagtctcacagatcctctgcatccactttgagatggacttgagctaaaattccattgatcatttgaccctccataagcccatactctgactggtggaccacagtgacattttgggtctcctgaaattagtgccagttcagagccattgtccagtagtccctgaaaggtctgattaattatttttcttcagtgcacatttattctgatagaaaggccatatgtccctttggggaaggctgagagaaagagtggcagtattcttggcagtgtaccagagtccttcctcaaggagactgagcctccccttcattcaaggagtgctgggtctgtaaacctgctcaagtctgggaattgattgagaggccgtgactctgtttttattattcaggttagacttttgttcacttgacctagaacttttccacttatgcagttcaagaatttggtaggcattctatctatatcacatctaggaacactataatctactagccaacaccataggtctgtgcaagtcatactattctaactgctgctttgactctgctgtcccttatggtaaccacacttaccttgcctttggcagttgagtgctgcccattggccccttccaccccaggatccaattattcccattgtatttaggttttctaattcagtgactgcaggtcctgctgtaaggtgtcacctacagagaagagtgatcacagagcccttcaaggatgctgaggttcccctcacaaatttattcctcaaagtaatagtgagatctgtgtcttctgaactctcccagtgttggtgagtatgtcttaaatgacaaattcactctagcatttcaatctcctttcttctacattaaaccagggcaagtctgaaatttctagtttgctcactgtgggccatcttttggtctgtgtttcagccaaccaattaaactgttagaggccttcctaattccctgagatgcaacattaagtccagaatctctgcttagtgggcccatgtcaataaatttggcctaatccaactttacgtgccttccaccgttatctcacatccttagtacccattcctatacatattctctggattcctgcttgtgtaaattagaaaactcaagtcatgattttggagtgtagtgcaccttgtcatgggtcaccttcatacctcacctcgcctgctgggacttgagtgtagttatagatctaataacaaagaggggtggtagggtgggtcctgaaggaatcagcattatcttgcatggcagttgcctcaggggaagccattacagtttcctcaggcagtgcagggttaatccacttagactggagtagagatactgccaccacagggctggagagaaaactttcactgacaaagaagactcatcaatatttaggagctcaatgtccccagcttaatcagggtcttccacacatacctaatccaacttgtagtgccccattctttcccaatcactgcccttgctttaacagtagacaccctgcaaagctgggagtttggcttgctttgtaattcagttagtcacaggatgagatttggcatttgattttcagcaatctcagctctgtggctacagtagataagggtctccttcagggcatacatagaatctgtcaagtcatttatgcagctcttgagctgggaattcaaattcctgagctcctccttttctttcatcactttttccagcaacattaggagcaaccgactaatcccatcatattcattagtttgacaaatatgttcacaagtgtcaatatacatagtcaccaagacccttgcttcttaaaagtagttgattaggagtatccaatggagatattttgcatatacatattttttgagatggagtctcgctctgtcacccaggccggagtgcagtggcatgatctcagctcactgcaacctccatctcccaggttcaagcgattatcatgcctcagcctcccgagtagttgggattacaggcacctgcctaatttttgtgtttttagtagagacagggtttcatcatgttggccaggctggtctcgaactcctgacctcaggtgatccatccacctcggcctcccaaagtgctgggattacaggcgtgagccaccgcgcccagcctggcctacatatttctattgccagatcatgccatggacaatttttactactgaaaatagtcattagtgtctttaaatttcatcaggttacagaaccaattccagaaatccaataacaaatttataaaatttatccttaaaattctgttcctttagaatcactcttggtgtgaaaatctgtattagtcatggttcccaaagaaacaaaaccagaaccaagaggagatacatacacacacacacacacacacacacacacaaggaattagctcatgtgattatggagtctgccaagtctcaagatctgcagggtgagttggcagcctagagaccccagagagctgattcgtagttccagttcaaagaccagcaggctacagacccagaaagagttaaaatgttttagttcgagcccaaaggcaggaaaaaaactgaagtcccagtttaaaggtagtcaaatagaaggaactgtctcttactaagaggacagtaagcctttttgttatatttaggccttcaactgattggataagttctacccacactggggagaacaatctgctttacttagtctaccaattcaaatgttaatctcaccaaaaaacactctcacagacacacataaaataaagtttaatcaaatatatgggcaccccatggcccagtcaagttgacacataaaattaaccaccataatgaggtatctagagcaggcaaattcataaagacagaaagtagaaaagaggttaccagggtcttggaatggggaagaaatggagagttatttttaatgagtacagagtttctgtttggggtgatgaaaaagttctggaaatggatagtggtaatgggtgcacaatattgtgagtatacttaataccactaaattgtacacttaaaaatgattaaaatggtaaattttatgtatattgtacaacaataaaaaaggctatatcactgacaatgcattgttgtatttagcaaagaaaggggaatctccagcctccccatcaacaaaaacccccacaaacttctattttaaaataatgagctgaaatcatagcggagaggtgaataatgagcaaatataaaaaggaagacctttcctcagacagaatgcccatattaatgttgttactggaagactaagccttgagcaaaatgcaaggagaactcagtgtgagaattctgcattgtcatgaatcccagaaggaagctagagaagttgcagataaatattatcctctggcacctggaagaaccattctcaacctactctagaaaaaaagcacctccagtttaggcctccaggattcctacatattaaaattataagatcacagacatagatcagcaaacatgcaagacaacaagacaacttgagtacaagtgaacagaaacaatcaattcagatttaaaacttgaagaacaccagatattgacattatcggatacataatatgaaataattatgtataaaatctttaaagtaataacatatggaaacatgaaaataaaagacaaattatccaacattattaggcagttgaaaaaaaccattgcaggttacaaagtcaacatgcaaaaatcaattgtatttttatatactaacaattacaaatatgaaaaggaaaacagaaaagtctatttacaatagcatcaaagataatacaatatttaggaataaatttaacgaaggaggtgcaagtcttgtccactaaaaacaaaaaaacccagttgaaagaaactaaagaactgtctggtctgaagacagcaaatatggaaaattagcaactagaaaaaaattaaaaattaaaaattaaaagagaaattaaataactaaataaatgaaaaggcatcctggatttatggatttgaagacataatattcttaagataagaatattaccacaaaccatttgcagattcaaagcaagcattctgggtttttttgtttgtttgtttgttttttgatttgagacggagtctcactctgtcgctcaggctgcagtgtggtggtgcaatctccactcaccataacctctgcttcctgggctcaagcgattctccggcctcaaagcattctctatcagaatcccaaagacatttttttttttgaggaatagaaaaatctatcctaaaattcagatggaatttcaagggaccctgaatagccaaaacaatcttgaaaaagaacaacgttggaggagtcatacttcccaatttcagaacttactacaaagctacaagaatcaaaacagggcagtacttacataaatatagacacatagatcaatggaatagaattgagagtccagaaataagcctatacatctatggtcaattgattttcaataaaagtgccaagaccattttgtgggaaaagaatagtctcttcaacaaatggtgctgggacaattggatatccacatgcaaaagaatgaagttggatctttaccatatacaaaatttaactcaaggctggatgtggtggctcacatctgtaatcccagcactttgggaggctaaggctggtggatcacttgagctcaggagtttgagaccagcctgggcaacacagtgagactctgtatctacaaaacaagaaaaaaaaattagctggcatgatggtacacacctgtagtcccagctactagggaagctgggataggaggatcgcttgagcccaggaggtggaggctgcagtgagccatgatcgcaccactgcactccagcctgggtgtcagagcaagaccctgtctgtaaaaaatcatttaactaaaaatgtatcaaaaaactaaatataaaagctaaaaccataaaactgtaagaaaaaacaaagaggtaaattgttatgatactggatttggcaatggtttcttagatgtgacaccacaatcacaagcaacaactctataaaaatatatatagtaggcatctttaaagttaaaagcttttgtacatcaaagaacactatcaagaaagtaaaaagatgatctacagtataggagaaaaaaattgcaaatcatatatctgataaagggcctagtatcccagaatataaaaagaactcttacaactcaacaacagaaagacaaccaaattttaaaatgggtaaaggacttcaatggaacttctccaaagaagatatacaaggatccaacaaactcatgaaaagatagacaacatcattagttattagggaaatgcaaatcaaaaccacaatgagatagcatttcaaacctgctaggatggctaaattaaaaaaaaaacaaaaacaaaatgtcaagcgggaaaataacaagtgttagcaagaatataaagaaattggaaccttccttgatgatgagaatgtgaaatagggcagccactgtagaaaatattttggcagttcctcagtaaggaaaacatagaattaacatagacccagcaattctactcctgggtgtggacccaaaagaattaaaagcaggcactctaacaaaaactaatatacaaatgcatatagaagtactattcataatagcaaacaggtgaaaacaattcaaatgttcatcaagtgatgaacagataaacaaaatgtggtctatccatatatggactattatttattcataaaaaatcaaagtactgatccatgctaaaacatggatgctccttgaaagcattatgctaagtgaaagcagccaggcacaaaaggccacattccacttatatgaaatacccagaatagcaaatccatagagacagaaaacagattagtggttgccagaagctggcagaaggagtgaatgtggagtggcttcttaataagtattgaatctccttttggggttatagaaatgttctggaactagatagtggtgatggctatataacattgtgaatgtactaaatggcactgaacttcacactttaaaattgttaaaatggtaaattttatgtttgcgaattttgcaatagataagtcagaagacatgtacattaccataatgagtaacaaactgacagctgatttctaaataatagcaaatatcagaaaataatgaatgatgtcttcacaatgctaaaataaacaatgtgaacccctctctcaaaaagaaaacctaatgaaaatatcttttatgcgttaaagcaaaagaggaaattaggacacagacaggcacagagggacgaccacatgaagatatagaaagaggacagacacctacaagccaacgagagaggccttacaagaaaccaacccttagccaggtgtggtagtgtgcacttgtagttcttgttacaagggtgcagtgagctagggttgtgccactgcactccagcctgggaaacagaacaagaccctgcctctaaaaaaaaaaataaagagaaggagaagaagaagaaaaggaaaagaaaaaaaaaaagaaccaagcctgctggccaggcgtggtaactcatgcctgtaatcccagcactttggaaggctgaggcaggaagatcatctgaggtcaggagttcaagaccagcctgcccaacatggtgaaacccccctctactaaaaatacaaaaattagctggacatgctggcatgcgcttgtaatcccagctactcgggaggctgaggcacaagaattgcttgagcccaggaggcagaagttgcagtgagcccagatcgcgccatcacattccagcctggactacagagggagactccatctcaaaaaacaaacagacaaaaaaaaaatacacacacacacacacacacacacacacacacacacaaaacaagcctgcctaccccttgatcttggacttgtagcctccagaactgtgagaaaataaatttctattgtttaagccaggtgtgcgtgtgaaaatttagaacatatgacaacagcaaaaaagtcagcatgtggataaatagaataaaggattctaaaatccatgtattatctaggaggtaaagatgttaatattaaaccttcataatttgattaatgttgtagtttataggatagccagtaagtaatagaaatacacacaatgtaagactcccaaaatggtagaagaaaaaatatgaaaggataaaatatactcaacaaacctaaatgaaagcaagcaaagagagataaagaaacataaaacaggtaggaaaaatagcaagataagatggtatatttaaattgaaatataacagtaatcatatgtaatatgaatggaccaaatatttcagttaaaagacaaagattgtcagattgataaaaaagcaaaagtagctgggtgtgatggctcacacctgtagtcccagctacttaggatgctgatgtgggaggatcacttgagcccaggaggttcagcctggacaagatagtgagacttgtctctttaaaaaaaaaaaaaaaaagcaaaagtaaattgtgtgcattttatgagtcatatctaaaacattagatacagaaaagtagcaagacaaaaatgggaaaagaaattatgcaaatatctaaaagatatcgattacagctctattgatagcagaaaaatagactttaaagcaagaaagtattgctgaagattaagaatgtgatttcatggctggacgcggtggctcacacctgtaatcccagcactttgggaggccgaggcaggtggatcatgaggtcaggaaattgagaccatcctggctaacatggtgaaaccccgtctctactaaaaaaaaatacaaaaattagccgggtgtggtggcggacacctgtagtcccagttactcaggagggtgaggcaggagaatggcgtgaactcgggaggctagattttaacacatctctcgtcaattgatggaacaatgtatagaaatagaacaattaacatgattcacaagtttgatcttatagacatatttagaaaatagcaccttgaaattgcaaaattacaagggtggttccaacatggccgaataggaacagctccagtctacagctcccagcatgaatgacacagaagacaggtgatttctgcatttccaactaaggtaccaggttaatctcactgtggcttgtcggacagtgggtgcaggacagtgggtgcagcccaccgagcatgagccgaagcagggtaaggtatcacctcacccgggaagcacaaggggtcagggaattccctttcctagccaagggaagctgtgacagatggcacctggaaaattgggtcactcccatcctaatactgcgcttttccaatggtcttagcaaacggcacaccaggagattatatcctgcacctggctcagagggtcccacacccacggagcctcgctcattgctagcacagcagtctgagatcaaactgcaaggtggctgcaaggcagggagaggggcacccgccattgctgaggcttgagtaggtaaacaaagcggccaggaagctcgaacttggtggagcccaccgcagctcaaggaggcctgcctgcctctgtacgctccacctttgggggcagggcaaagacaaacaaaaagacagcagtaacctctgcagacttaaatgtccctgtctgacagctttgaagagagtagtggttctcccagcacagagtttgtgatctgagaacggacagactgcctcctcaagtgggtccctgacccccgagtagcctaactgggaggcacgccccagtaggggcagactgacacctcacacagctgggtacccctctgagaccaagcttccagaggaacgatcaggcagcaacatttgctgttcagcaatattcgctcttctgcagcctctgctgctgatacccaggcaaacagggtctggagcggacctccagcaaactccaacagacctgcagctgagggtcctgtctgttagaaggaaaactaacaaacagaaaggacatccacaccaaaaccccatctgtacatcaccatcatcaaagaccaaaggtagataaaaccacaaagatggggaaaaaacagagcagaaaagctgaaaattctaaaaatcagagtacctctcctactccaaaggaacgcagctcctcgccagcaacggaacaaagctggacagaaaatgactttgacgagttgagagaagaaggcttcagatgatcaaacttctctgagctaaaggaggaagttcgaacccatcacaaagaagctaaaaaccttgaaaaaaaaggttagatgaatggctaactagaataaccagtatagagaagtccttaaatgacctgatggagctgaaaaccatggcacgagaactatgtgacgaatgcataagctttagtagccgatgcgatcaactggaagaaagggtatcagtgattgaagatcaaatgaatgaaatgaagcgagaagagaagtttagagaaaaaagaataaaaagaaatgaacaaagcctccaagaaatatgggactatgtgaaaagaccaaatctatgtctgattagtgtacctgaaagtgacagggagaatggaaccaagttggaaaacactctgcaggatattatccaggagaacttccccaacctagcaaggcaggccaacattcaaattcaggaaatacagagaacgccacaaagatactccttgagaagagcaactccaagacacataactgtcagattcaccaaagttgaaatgaaggaaaaaatgttaagggcagccagacagaaagttcgggttacccgcaaagggaagcccatcagactaacagctgatctcttggcagaaactctacaagccagaagagagtgggggccaatattcaacattcttaaagaaaagaattttcaacccagaatttcatatccagccaaactaagcttcataagtgaaggagaaataaaatcctttacagacaagcaaatgctgagagattttgtcaccaccaggcttgccctacaagagctcctgaaggaagcactaaacatagaaaggaacaaccggtaccagccactgcaaaaacatcccaaattgtaaagaccatcgatgctaggaagaaactgcatcaactaatgagcaaaataaccagctaacatcataatgacaggatcaaattcacacataacaatattaaccttaaacataaatgggctaactgctccaattaaaagacacagactggcacattggataaagagtcaagacccatcagtgtgctgtattcaggagacccatctcacatgcagagactcacataggctcgaaataaagggatggaggaagatctaccaagcaaatggaaaacaaaaaaagaaaagcaggggttgcaatcctagtctctgataaaacagactttaaaccaacaaagatcaaaagagacaaggccattacataatggtaaagggatcaattcaacaagaagagctaactatccaaaatatatatgcacccaatacaggagcacccagattcataaagcaagtccttagagacctacaaagagacttagactcccacacaataataatgggagactttaacaccccactgtcaacattagacagttcaacgagacagaaagttaacaaggatatccaggaattgaactcagctctgcagcaagcggacctaatagacatctacagaactctccatcccaaatcaacagaatatacattcttctcagcaccacatccaaaactgaccacatagttggaagtaaagcactcctcagcaaatgtaaaagaacagaaattataacaaactgtctctcaggccacagtgcaatcaaactagaactcaggattaagaaactcattcaaaaccgctcaactacatggaaactgaacaacctgctcctgaatgactactgggtacatagcgaaatgaaggcagaaataaagatgttctttgaaaccaatgagaacaaagacacaatataccagaatctctgggacacatttaaagcagtgtgtagaggaaaatttatagcactaagtgcccacaggagaaagcaggaaagatcaaaaattgacaccctaacatcacaatttaaagaactagagaagcaagagcaaacacattcaaaagctggcagaaggcaagaaataactaagatcagagcagaactgaaggagatagagacacaaaaaaccctttaaaaaatcaatgaatccaggaactggttttttgaaaagatcaacaaaattgatagaacactagcaagactaataaagaagaaaagagagaagaatcaaatagacgcaataaaaaatgataaaggggatatcaccaccaatcccacagaaatacaaactaccatcagagaatactataaacacctctatgtaaataaactagaaaatctagaagaaatggataaattcctggacacatacaccctcccaagactaaaccaggaagaagttgaatccctgaatagaccaataacaggctctgaaattgaggcaataattaatagcttaccaaccaaaaaaagtccaggaccagacggattcacactcaaattctaccagaactacaaggaggagctggtaccattccttctgaaactattccaatcaatagaaaaagatggaatcctccctaactcattttatgaggccagcatcatcctgataccaaagcctggcagagaaacaacaaaaaaagagaattttagaccaatatccctgatgaacattgatgcaaaaatcctcaataaaatactggcaaaccaaatccagcagcacatcaaaaagcttatccaccatgatcaagtgggcttcatctctgggatgcaaggctggttcaacatacgaaaatcaataaacgtaatccagcatataaacagaaccaaagacaaaaaccacatgattatctcaatagatgcagaaaaggcctttgacaaaattcaacaacacttcatgctaaaaactctcaataaattaggtattgatgggacgtatctcaaaataataagagctatttatgacaaacccacagccaatatcatactgaatgggcaaaaactggaagcattccctttgaaaactggcacaagacagggatgccctctctcaccactcctattcaacatagtgttggaagttctggccagggcaatcaggcaggagaaagaaataaagggtattcaattaggaaaagaggaagtcaaattgtccctgttcgcagacgacatgattgtatatctagaaaacaccattgtctcagcccaaaatctccttatgctgataagcaacttcagcaaagtctcaggatacaaaatcaatgtgcaaaaatcacaagcattcttatacaccaacaacagacaaacagagagccaaatcatgagtgaactcccattcacaattgcttcaaagagaataaaatacctaggaatccaacttacaagggatatgaaggacctcttcaaggagaactacaaaccactgctcaatgaaataaaaggggatacaaacaaatggaagaacattccatgctcatgggtaggaagaatcaatattgtgaaaatggccatactgcccaaggtattttatagattcaatgccatccccatcatgctaccaatgactttctttacagaattctaaaaaactattttaaagttcatttggaaccaaaaaagagcccgcattgccaagtcaatcctaagccaaaagaacaaagctggaggcatcacgctacctgacttcaaactatactacacggctacagtaaccaaaacagcatggtactggtaccaaaacagagatatagaccaatggaacagaacagagccctcagaagtaataccacacatctacaaccatctgatctttgacaaacctgacaaaaacaagaaatggggaaaggattccctattgaataaatggtgctgggaaaactggctagccatatgtagaaagctgaaactggatcccttccttacaccttatacaaaaattaattcaagatggattaaagacttaaatgttagacctaaaaccataaaaaccctagaagaaaacctaggcaataccattcaggacataggcatgggcaagaacttcatgtctaaaacaccaaaagcaatggcaacaaaagccaaaattgacaaatgggatctaatgaaactaaagagcttccgcacagcaaaagaaactaccatcccagtgaacaggcgagctacaaattgggagaaaatgtttgcaatctattcatctgacaaagggctaatatccagaatctacgaagaactcaaacaaacttacaagaaaaaaagaccccatcaaaaagtgggtgaaggatataaacagacacttctcaaaagaagacatttatgcagccaacagatacatgaaaaaatgctcatcatcactggccatcagagaaatgcaaatcaaaaccacagtgagataccatctcacaccagttagaatggcgatcattaaaaagtcaggaaacaacaggtgctggagaggatgtggagaaataggaacgcttttacactgttggtgggactgtaaactagttcaacaattgtggaagacagtgtggcgattcctcaaggatctagaactagaaataccatttgacccagccatcccattactgggtatgtacccaaaggattataaatcatgctgctataaagacacatgcacacgtatgtttattgcggcactattcacaatagcaaagacttggaaccaacccaaatgtccatcaatgatagactggattaagaaaatgtggcacatatacaccatggaatactatgcagccataaaaaggatctgttcatgtcctttgtagggacatggatgaagctggaaaccatcattctcaaaaactatcacaaggacaaaaaaccaaacaccgcatgttctcactcgtaggtgggaattgaacaataagaacacttggacacaggtaggggaacatcacacaccggggcctgtcatggggtgggtggacaggggagggatagcattaggagatatacctaatgtaaatgacgagttaatgggtgcagcacaccaacatggcacatgtatacatatgtaacaaacctgcacgttgtgcacatgtaccctagaacttacagtataataaaaaaaaagaaattgcaaaattacacattctttgtaagcacacaaaggaaacatgttagaattttccattttaagctacaaataagctacaaataaagtagtctcaaatttcagataatataaaacatgttttctggtcacaatacaattaaagttgatataaataagaaagataactataaaatcttcctatgttagaatcaagaactatacttttaaacccatgtgtcaaataagaaatcataaattagaaaatattttaaactgaatgataacaaggcatgacatattaaaatgtgggaatcagctaaagcaatatttagaaagaaatgtatagcgttaaaaacatatattggaagagaagaaagcctgacaattaatgagctaaggtatgtctcaagaagctagtgaaacagcaaaataaaccaaaaggaagtagaagcaaggaaataataaagatatgaagtaaatgaagtaaaaaagaaacatacaatagagagaataaagaaaaccaaaagttggttccttgaaaattgacaaacttctggcaagagcaatcaagatgaaaagaaggcacaaataatatcagaaactttaaaaaactggacatcaataaagatcccacaaaaatttctgccaatataaaaatataaaaaatgaggatacttattaatattaaatgttctttcttgttgtatttaccagggattaatccattttacctaattttccaaacttagtgttaaaaggttattaatttaaaaaatccagatccagatggctacactaactatattctaccaatttttcaaaggagaaataatattaaccttgcaaaaattctttcagaaaatggaaaaagatggaatgttattcaattatcttatgataatagcataaccttgacaaccaaaccgaacaagaacaatattagaaaggaagataataggcccgttttattcataaacataaatcccaaacaaaatattagcaatatggatccaaattggatttatgctaggaatgcaagtttggcttatacattagaaaactgatataatttatcacagtgacagactgaaggattatacatattggctgtcctaagcagtgcaataagatgagaaaaagaaggaaaatatgtaaggattgaatatgatgaaacaaactcattgtatgtggaagatatgatggcatagatagaaaatccaaaggaatttatatataaattattagaatttttaaaatttttcaagcttgctgaaaacaaaataaataccaaaattaattgtatttctgtatacctgaaacagttggaaaaatagttttaaatagcatttaaaaattccaagcaggagttgcacattcctgtcagataatggcagctgcctaaatctctccacagtcttcaaaaaccatacatacacatacacacacaattttaaattatgactaaaaccacccataacccatctatagaataaccagaagacaaaaagtactataagtttatatttacaagtagaaaataaatatataaatctagccaaccttgctccagagagaaaccctgtctcaaaaaaaaaaaaaaaaaaaaaaagaagaaagcaaatgttggaaattaactgtcctataaaaacaaaagtgaattactaaatcacaagacccacaaacctctttggtcacatctattaaataaattacacttccatttatcaacagtagagggtactcctggctaagaaacctagtaagccacccagccctcatgtctgcctgcataaatcacctcttattgctgaaacaagaaaatgtaaggaatttctaaatgaacagaaaatagcatatgaagcagatggtattaatgttcttgagtttttattccctctttccttgaaaacctcatcaactttaggcatggccgtacggctcatcttgatcaatagaatgtgattggacatgacatatataccacttccaaatagaagctttaaatgtgattttgtgtttgacacactcttttgtgcctctgctccaggctccagactttaagcctctagaacgataagtgaataaatttcttttgttttaaaggcaccaagtgtgtggtgaatttgttacagtagccctagaaatctaatactaacaaaaagaatgttagagttgaattagaagtgtcagtgagaacttaggaatttaaaaaatcatattcttagcactgttcactgagggaatctagaagtaattacactgcagtaataacgagcccatcccatgcccaaatcttggtctctaactaccattttccagtcaaaagaatctgagctccctagagaaatgactttttcaaggctggatcaaggaaactgccaggcaatcttagatgatcttggtgatcttgatgtgccagaagattaatgggatcatgtgaaaagaacacagaaactggtctgaagggcttcctgttggccagatttgagacaatttgagcatcaaaaggaataatgagggtaatggatcataactggaaaatcagtttgcaaccatcaatgtacttactattgaatacttgtaaagaactttaagggttgctaataccattggataaaagcttgttgtgaaacagaatatttgcatggtctcaaagtctcactccacagattgttaggaaagggaaagggttacctttataaatatagagattaggtggacatcttaaccaagtgatcaaacttagcatcatcaataatgggacaatctggcatcgcatgccccctgatttaatgcagtaaggattaagtctaacaaaagatgtacaaagcctccaaatacagcgtaaacatttgtaaaataatctcagaacagggaccttaatgtttctcaaaaatttttccaaatacagaactttatttctatagatgtttatggtatatttgccatgctatatacattatgctatatattctatgtgctgaagatacaacaatgaccaaggtctttgcccttgtggaactgacatttggtggcggagacagaggaaacagtcaataagcatgtaaagagataaaggaaaagatactgaatgctacaaaggaaacaaataagttgagatttagaacaaaaaagagtcctattttacaagaggaataatgaggaagacctttctaaagaggtagctcagcactttgggaggccgaggcgggtggatcacgaggtcaggagatcaagaccatcctggctaacacagtgaaaccccatctctactaaaaatacaaaaaatgagccgggcatggtggcgggcacctgtagtcccagctacttgggaggctgaggcaggagaatggcgtgaacccgggaggcggagcttgcagtgagccgagatggtgccactgcactccagcctgggcgacagagcgagactccgtctcaaaaaaaaaaaaaaaaattgaggcagaatttcgctatgttgcctaggcttgtctcaaactcctgggctcaagcaatcctcctgcctcagcctgctgagtagctgggactccaggggcatgccactatgcttagtttaagaggtggtatttaaactgagacccgaagggtaaaaaacatggataaaagaagaaacagaaggggtaagagccttccaagcagagggaatcacatatacaaaggctctcatgttaaataaaacaagagttgacattgttgagaaactgaaagatcagctcatctgcgatgcggtaaaataggaggaatgcagtgggagaacagatcagagacttgggcaggggctatattaggcagaacttggagaccagagtaagggggccaaggtgggaacagaccgattaaattggcatctcttgggggggtgggggggtggggaacttacccatgcatcattttttaaaagctccaaaggcgattccaataagcagccagggttgggaacctagggggaaaatgtagctagatgaatgaagatggcccaaacgtcttttgttctgatagctaaactctctgtaggatcacagtgttacttcacagtgcatttgccaggaaaagtctcttcccatttggaatccgaagtaaaactgacaccacacttgaagatgccaggattgttagaggaaaatgtcacccaatagctccaggaagcaggagccctactgttgctgtttaaccacttctttcccattttggtggcaagttgcctccttttacacaaactgcctcaggagatcctaaagatatcatggtgtctgtctgtccttgcaagagcatgcattatggtaggacattgccttcattctgttcctttttctccaagactcttgcttattctcaccatttggctggactttctactgtaggattacctcggaatccacacaaaacccacagggtttcagagttgccttgaattacacgttttgaacattcagatcttcattttcccaaacatccacccagttataggtgacctttgctccaaagtcctggagtagcaaggtgccttgagtcttagactcttcccacttctttctctcttctgcatcccctcctgccaaggttgcccagccacactaaattgcatgccttgctgtgttgcattcgttatcattctaaagttgtcaccaacatgtgcgaaaccagtttatctaataacgatagctaccattttctgagctcttgccatgtactcctcttgccacagcaaatgcattgacaagggagtctgctggccaaagcctgactctcatctccagatggtccaacacagatgctgtgtgtgacccaggacaaagcacttaatgtcactgaggtttgggaagtgggtgagaacactgtagatataaggcctagctagagtgaaggcctccaaagcagggtgctcttaattctagatgtcccagatgcgtaggacagagtcatctagtcatcttccagggtttaatcctggactactggaaacaactagaagtgagaaaagcgtctgtgctttgcagtgaccattgtcctgtcagacaaccaataaatgctatctttcctctttcaggtttttcagggaaatcaagactccttcacacctgtggtgaactctctagacccaccgttactgactcgctaccttcgaattcacccccagagttgggtgcaccagattgccctgaggatggaggttctgggctgcgaggcacaggacctctactgagggtggccactgcagcacctgccactgccgtcacctctccctcctcagctccagggcagtgtccctccctggcttgccttctacctttgtgctaaatcctagcagacactgccttgaagcctcctgaattaactatcatcagtcctgcatttctttggtggggggccaggagggtgcatccaatttaacttaactcttacctattttctgcagctgctcccagattactccttccttccaatataactaggcaaaaagaagtgaggagaaacctgcatgaaagcattcttccctgaaaagttaggcctctcagagtcaccacttcctctgttgtagaaaaactatgtgatgaaactttgaaaaagatatttatgatgttaacatttcaggttaagcctcatacgtttaaaataaaactctcagttgtttattatcctgatcaagcatggaacaaagcatgtttcaggatcagatcaatacaatcttggagtcaaaaggcaaatcatttggacaatctgcaaaatggagagaatacaataactactacagtaaagtctgtttctgcttccttacacatagatataattatgttatttagtcattatgaggggcacattcttatctccaaaactagcattcttaaactgagaattatagatggggttcaagaatccctaagtcccctgaaattatataaggcattctgtataaatgcaaatgtgcatttttctgacgagtgtccatagatataaagccatttggtcttaattctgaccaataaaaaaataagtcaggaggatgcaattgttgaaagctttgaaataaaataacaatgtcttcttgaaatttgtgatggccaagaaagaaaatgatgatgacattaggcttctaaaggacatacatttaatatttctgtggaaatatgaggaaaatccatggttatctgagataggagatacaaactttgtaattctaataatgcactcagtttactctctccctctactaatttcctgctgaaaataacacaacaaaaatgtaacaggggaaattatataccgtgactgaaaactagagtcctacttacatagttgaaatatcaaggaggtcagaagaaaattggactggtgaaaacagaaaaaacactccagtctgccatatcaccacacaataggatcccccttcttgccctccacccccataagattgtgaagggtttactgctccttccatctgcctgaccccttcactatgactacacagaatctcctgatagtaaagggggctggagacaaggataagttatagagcagttggaggaagcatccaaagattgcaacccagggcaaatggaaaacaggagatcctaatatgaaagaaaaatggatcccaatctgagaaaaggcaaaagaatggctacttttttctatgctggagtattttctaataatcctgcttgacccttatctgacctctttggaaactataacatagctgtcacagtatagtcacaatccacaaatgatgcaggtgcaaatggtttatagccctgtgaagttcttaaagtttagaggctaacttacagaaatgaataagttgttttgttttatagcccggtagaggagttaaccccaaaggtgatatggttttatttcctgttatgtttaacttgataatcttattttggcattcttttcccattgactatatacatctctatttctcaaatgttcatggaactagctcttttattttcctgctggtttcttcagtaatgagttaaataaaacattgacacatacaaacaaatgcctttgagaattgtgtttttacactggaaataaaaatgtgaacactgatttttaaaacaaataggggcactgaatagcaagatggacactctagaaaaccaaattagtgagttagaaaaccagattaaattgaactcagagtaaaaatgatataattcatgagagtctgaataaaataaatcagaaatggagcctcaatccaggagaacagcttatatggagagagagagactgagagagaaatgggagtttctgttcaatgggcataaagtttcagctatgctgctgggcacagtggctcatgcctgtaatcctggcactttgggaggccaaggcgggcggatcacctgaggtcgggagttcaagaccagcctagccaacatggcgaaatcccgtcgctaataaaaatataaaaattagttgggcatggtggcacatgcctgtagtcccagctacttgggaggttgaggcacaagaatcgcttgaacccgggaggcgggtggaggttgcagtgagccaagatcgtgccgttgcattccatcagcctgggcaacagagtgagactccatctcaaaaaaaaaaaagtttcagttatgcaagatgaattaagttctacagatctaatgtacaacattgtgcatatagctaacgataccatactgggcacttaaaaatttgttaagagagcagataccacgttgtgttcttactacagttttacaacaatgcaaaaatgcattgtaaacactatgtgcaaatagaatagcaaagaatgtatacagtgcccatgagcataacattctagtggacccacaatgcatcagagttcagtgagactcaaagggagaagaatgttggcaaagtcagtggggaggagaaaatgagtgtgatgaaataggcggtctcattaaacttcccttacaaaacacaagatcaaagataaaattattaagaatttcgagacagtgacatcagagcaaacgaaacatagg

SEQ ID NO: 4 - DNA, 188930 bp, Artificial Sequence
  synthetic construct
tcaccatggctacattctgatgtaaagagatatatcctatacctgggccaaatgtaaacagcctggaaaagtgttaggttaaaaacaaaacaaaataaataaatgaataaatgccaggtggttatgagtgctattgagaaaaatgaagccaagagggatatcagtgatgcaggtgggggtaaagagcttacaacataaatgtggtgttccatatttaaacctcattcaacagggaagattggagctgaaatgtgaaggagttgtgggagtggaactacgtggaaatctgggggaaaggtgttttgggtaaaagaaatagcaagtgttgaggtccaggggcatgagtgtgcttgatattttagggaagagtaaggagaccagtataaccagagtgagatgagactacagaggtcaggagaaagggcatgcagaccatgtgggatgctctaggacctaggccatggtaaagatgtagggttttaccctgatggaggtcagaagccattggaggattctgagaagaggagtgacaggactcgctttatagttttaaattataactataaattatagtttttaaaacaatagttgcctaacctcatgttatatgtaaaactacagttttaaaaactataaattcctcatactggcagcagtgtgaggggcaagggcaaaagcagagagactaacaggttgctggttactcttgctagtgcaagtgaattctagaatcttcgacaacatccagaacttctcttgctgctgccactcaggaagagggttggagtaggctaggaataggagcacaaattaaagctcctgttcactttgacttctccatccctctcctcctttccttaaaggttctgattaaagcagacttatgcccctactgctctcagaagtgaatgggttaagtttagcagcctcccttttgctacttcagttcttcctgtggctgcttcccactgataaaaaggaagcaatcctatcggttactgcttagtgctgagcacatccagtgggtaaagttccttaaaatgctctgcaaagaaattgggacttttcattaaatcagaaattttacttttttcccctcctgggagctaaagatattttagagaagaattaaccttttgcttctccagttgaacatttgtagcaataagtcatgcaaatagagctctccacctgcttctttctgtgccttttgcgattctgctttagtgccaccagaagatactacctgggtgcagtggaactgtcatgggactatatgcaaagtgatctcggtgagctgcctgtggacgcaaggtaaaggcatgtcctgtagggtctgatcggggccaggattgtggggatgtaagtctgcttggaggaaggtgcagacatcgggttaggatggttgtgatgctacctgggccccaaagaaacatttctgggtaaggtgtgcacacatctgtgttattagcagaaatgctaactgccaattcttttcataggtctgacctatttgttgatattttgttctgttttgtccattgcttctcttcgtcatatgctgctcctccagaatctagagactggagtagagggagggtgaagggacaaagacaaaacttccctctgcctgcccaagcttccatagagagaatcaaggcaatgaaatccaatcaatatcacacacaagtttcatgtctggttctcttgtgtgtacatgcaatgtgtgtttttataatatcttttcctactttgggtgtaaggataatatgagccttgagttcagaagcttttcgtgttttgggggttctggtgcatttaggcagagtattaaataactttatcaatattgtctatggtcatcagttgattcagatttttctacctcttcttcagtaaatattggtatattttggtctatactttcatagaaagcaatctactgtccctagatttgataatgtattggtatcaagttatgtaagagtctcctgtgattttgttaaactgttctgtgtctgtagttatattttctttttcattccttatgttgtatatgttctcttcctctcttttaaaaataatatttccaggagttttcttgattttattggtcttgtcaagaattttcttttggtttgatttatcaatctcttttttctttctgttgcatcagtttctgcttctactttcattgatttattccttccttctaatttcctttggttcattttgttgttagatttttgcttcttgagttgaatgctgaaatcatttattttatttttttgtcttctttaaatgtgtattataaagatttaaatataatacatagattgtggctgtgtaaacattaaatgtggtcatgttgtacatactttatattctttttggttctttctgtttggctccccaccctctttccacatcagtccccttctcccccacctcagctaggtaaccccagtatgataatatatattcacatacacatacacacacacaaaggttttcttggacattatttgttttataaaattgggacattatacacacatttctcactcattaacacgtactagaactctaagtcaattggtatagctttaattcattatttttattggctatataagattctatggtatggctgtatcacaatttagtcaatatgttcactttattccagtttttggctactatatcctatatcattacatactggtgcttttacttctgttgaacaaacttgcaagaggaatattaatggaacgaagggaatgtttccttctaagttttaatttccaaagaggtcagaacttttcaaacatttctaccatcgaagtatgaaaatggccttctctctgcattcacatagcgataagttttatcctgtttttaaaatttgccaattttacaggtgtagagtgatattgcatcattactttcattgtgttatttttatttctaataagttgagcatctttttaaatgcttgttggctattggatttatttgggggatttaattagtcatatgatttgcccattattctttggactctttcatttaaaaaaattatgagaacccttttattattacaaatattaactctttgtcatgtatattgcagttttccccaagatctattgtttgtctgttgactttcttataacttttaccaaaacagtttttaatttttataatcagagatatcttttctttcatatcttcagagtcggcaaggttggttaaaaatgtttcccacacctcaagattgtacgtgtaatctcccagattttcttgcaagatgtttactgtttcgctttttatatgcattgcttcaattatctgctaattacttttgtcatatggcatgagagagggatttgtctagttttatttccatccagatcaatagcctattgtgatggcaccttttgccactgatttgaatcaacacattcatcatataaagttctcatatatattagcatatatttctggattcattaggctgtttcactaatctactattatcttgctatgccagtaccatagtgatttgattacagtgagcctatgatatcttctgatatctggtgggtgaaagcaatcctcactattctttttgtacctttcttagctattcttagacactttattcttccacataaaactgttaagatatttttcaaattaaaaagatccaagccctgttgtgattctaactgcaatttcattaaactcagaccttaattttattaatgtaataaatttaaatatttttcttattacatttatctctgtgtattttataagtgtgatgctattgttaataagatagttttctcctatttccatttatgagtgcttagtaccaaatagagataagctattggtttgtgtattttcagctttttcttttgagcctgggtctcattttgtcacccaggctggagtgcagtggggtgatctcaccttactgcagcctcaacctcctggattcaagcaattctcctgtatatcagccccccaagtagctgggactacaggagcaggccaccatgcccggaaaatttttgtatattttttagagatgggtttttgccatgttacccaggctggttttcaactcctgagctcaagcattccccccacctcagcctcccaaagagctaggattacaggtttgagccaccgcacccagccattgtatattcatcttaaatctagctaccttaccaaatttgcctattaattctagtaattttaccctaaagtctctgtgagtattgaatcatatcataagttaaatgagacagattttagctcatttccaatatttatagccagttatttcattttcttatcttattgaatttattagaaaacaagagcaaatgttaaataataacaatgaaagtgaacattccttctactctatgattttacttgaaataatttttgtattttgctatttagagtaacatttgctgttttggtttttgtaaatggtgtttattctattctcatttgccacaaaatgtttatcataaataagttttcagcagctggtatcatctgaattgtcttctttgatatgctgatgaacaaattatgttcatagatgtcctgacactaaatacccttacattcttggagtaaaatctactattcatggaatttgatcattagtgggttctatgtactatttctttagactattcttagtagattttcactactcaacctactaataataataaacaaagttttgttggctttatcaaatgaattgatgagtactccatctttttctattgcttagaatagcttaagtaacatttgaattatccattgtctaaaagttaggtgagactcacttatgaatccatttggtcctagtggcatttgcaatatctttaatcacccctccaggctcttctatgataatcagtcaattcaagtttcaacttccaataattatatacctttctaggaagtaactttatttattttttcaattttgttgccacagtgttgcatgtagcactcactcatgattcttttactccacattatctgtagttatgtgccctttcttattcctaaattcctctatctttgctatttatctttttttccttgaataagcttgccaatgacttgtctattttgttgctggtggtgctcttttcaaagaatgggcttttggattttttttttttctagttggtataaagcatttttattttcactgagcagaaaaagaagctattgattcattaactgtgctgctttattggcatgtagctatgcactgttcacacattaatatataaaactcgtcagtctgttttattttgtctgatgggaaaacatgaacagtgagatttcttatgcaaaaagtgaacagttcaactatgctagctccatatacctttattaacattccagagacttatcctctcaacatgatctgatttctgtaggataacttttcaggaaaagtattttctgatcagtgaagcttggagatataaataagcaatcggccaggtatggtggttcatgcctgtaatcccagcactttgggaggccgaggcaggcagatcacctgaggtcaggagtttgacaccagcctagccaacatggcaaaactccgtgtctaccaaaaaaaaaaaaaaaattagctgggcatggtggtgctcacctgtaatcccagctactgaggaggctgaggcaggagaattgcttgaacctaggaggcggaggtggcagtgagctaagattgtgctcagcctaggtgacagagtgagactccatttcaaaaaataaaaaaataaaaaaaagcagtatctctcatattcattaactggaccctgactttcttaaagctcaccccaaagctgaagtccatgaaggcactagttctcaaacttcagtgtgcataagaatcactcgggaagcttattaaaatttacattcctaggccccatcctcagcaaactatttagtccccaggtaattctatcccaccccaccccagctttattgtggtataattgacaaataaaagttgtatatatttaaggtgtacaagataatgttttgatgtaagtatacattgtaaaatggtatagcatgaagggttttcttttcatttttttcagaatagtttgtaatatcttctttgatttcatctttgataatctagacgtatgattttaattgctttttaaatttgtttatcaagttagtttgtagtatttgggtcaacattgaatatcctgttaatttcctattgctgtgtaacaaactacatcaaatgtatcagcttatgacagacccatttactgtctcacagtttctgtgagttagaagtccaggtggactcagctggatactctgtgcagggtcatacaaggccaacaccaaggttttaatagggctgcactccttagtgaaagctcttggggagaatctgcttacaggctcatttggaatgttagcaaattcagttccttctctcactttccatgtagtgccctctaccagcaatggtgcatcaacactctctcatgcttggaattgctctgacttcaattttccgtgcatatctctggccttttttgcctctctcttttacttttaaggactcatgtgattacattgggccgacctgggtaattcagaatactctccccatctcaaggtcagctaatcagccccttaattccatctgcaaagtttaatttgccacataatatatttttggacatgacaccaaggagcaaaggtgatgtgggccaaatttttacctgccacaggtatagtttacatacaatgaagctcatcaattttaaatatgcagtttgatgagttttgacaaatgcatacacttgcataaccaccaccctaatcaacatgcatttacatcaaccctcctgcaactttttaatgagtctctcccactgacctggcctcagccaataaactgctatctggaagttacagatttgttttcacatgttctagaattttacatcagtggaatcatacggtatgtattcttctatggctttttttcttcagcatcatgatttggaaattcatgcaggttgttgtataaagtatttctatcctttttattgctgattactgctccattatgggattatatcataattttggattatttccagttaggagcaaatacaaataaacctgctatgaacagtgctccacatgttttgtgtgaacatctattttcatttatcttagttaaatatctaggagtggaattgctggatcatatggtaagtgcatgtttaagagaaactgccagacagatttcttgaacgtaccattctatactcccaccagcaatgcatgagagttccagttgcaatatatcctggacaacatttgatgttgccagtacttaatgactgcacagtggtatctcactatacttttttttttttttgagatggaatctcatcccatcacacaggctggagtgcagtggcgcaatctcagctcaacatctgcctcctaggctcaagcaattctcatgcctcagcctcctgagtagctaggactatggtcacacgccaccgtgcccagctaatttttgtatttttggtagagacggggttttgccatgttggccaggctggtctcaaactcctggcctcaagtgatccacccgcctcggcctcccaaaatgttgggattacggcttgagccactgcacctggttatacttttaatttgcgtgtctctgatgactaaagatgttgagcatctttgcatgtgctaattagccattcctatatcttcttggaagtgtctattcaaatcattggtcctttgtttttaaacgtagtttcaacttttattttagactgaggaggtacatgtgcaggtttgttacatgagtatgttgcatggtgctgaagtttgggttacgaatgaatgatcctgtcactgaagtagtgaacatagtacccaataggtggtttttcactccttgctacccttcctcctccctctttcctctagtcgtctccagtgtctattattctatgtccatgtgttctcatcatttagctcccacttctaagtgagaacatatggtatttggttttcagttcctgtgttaattcacttaggataatggtttgccagtttttaattgggttgtttgtcttgttattgttgagttttgataattttttatatattctgggtacaagactattcagaggtacctgttttgaatgtttttttccaatctatggcttgcattttcattttccaaatggtgtctttcaaatagtggaaatttatagttgtagttaagtccaatttagcttttcttcttctatgattcatgcttttttttcccctgtcctaggaaatctttgcccacctcaagttcacaaagcctttcttctgttttcttctagaacttttatcattttagcattagtatttaggtttataatacattttgagttaaattttctgtatggtgtgacttttctttctctattgaattcccttggtgcctttgtagaaaattaaatgactgtatataggcaaatctgtttatggattctctagttccatagatgtgtatatctgtgcttatgccagtaccagattgttttgattgttgtaactttatagtaagtcttaatatcaggcagtctaaaacctccaacttacttttttattgaaattgcttttgatatatttaggcttttatatttctgtattaattttatagtcaactagccaactccaccaaatagccaactgggattttgactggaattgaattgaatctgtagatcaatttggggagaattgacatttaaacaatactgaatctttcaatacaacaacatggtatggctttgtttctttaaattttctttaatttccctctaggatattttgtagcctacagagtagttcttgcaagaattatattaattgtatccccaagtattttgagggattcgatgctattgttaattgtatcatttttatttgttttcgttttccaatcatttgttactaaaatatagaaattcaattgatttttgtatattgaccttgttcactctaatcttgttaatttgcattttagctctagtagcgttttgcacttcttttagaatttctacatatacaataatgttgtctgcaaataaagacagtttgcttcttcctttccaaactggatgctttttattttttttttcatgccttactgtactggcaagggcctccagtacaatgttagatagaactgatgatagcagaatccttgtcttcttcctgatttcagagggaaaatattcattattttaccattaagtacaattacttgtaaattttttcatagatgccctttgtcaaattgaggaagtttccttctattcttggtgtgagagtttttatcaagatttgatattagattttgtcaaatgctttttctgcatctattcaaatggtcatatggtttatcttgtttattctgttatggtgaattaccttgattgattttttaatgaggaactagctatgtattcccagggaaaaaatccacctggttgtgacatattacattggtaatattttcgctatggactgaattgtctccacctccccccaccccaaattcatatgttgaagtcctaactctcaagatgattatatttggagatagggcttttaggaggtaaacaaggttaaatgaggccataaggatggagtcctaatctgataggactggtggcctcataagaagagagaaggttctctctctacactcatgcactgaggaaaagccatgtgaacatacagcgagaaggcagccatctaccagctgggaagagggctccactagaaactgaccgtgctggcaccctgatattggatttccagcctccggaactgtgagaaaataagtttctgttgtttaagtcacccaatctctagtattttgttatggcagccctggccaactaaaactgttttgttaagggttttggtggtgatggtggttttttagtttttgcgtctgtgttcatgatggatatttggctgtgattttcttataatgtcattgtctggttttgatataagagtggtattagtccgttctaatgctgctatgaggacatacccgagactgggtaatttataaaggaaagagatttaatggactcacagttccacatggctggggaggcctcacaatcatggtggaaggcaaaggaggagcaaagacacatcttatatggcatggtggcagacaagagagcattgtacaggagaactgccctttataaaaccatcagccctcatgagacttattcactataatgtgaacagcatgggaaaaccccactgccatgattcaattacctcccacctggtccctctcacagcacatggggattgtgggagctacaattcaagatgagatttaggtggggacacagccaaaccatatcaaagagtaagactattctttttttttttttttttttttttgagacggagtctcgctctgtcacccaggctggagtgcagtggtgcgatctcggctcactgcaagctccgcctcccgggttcacgccattctcctgcctcagcctcccgagtagctgggacgacaggcgcccgccaccacgcctggctaattttttatactgatagtagagacggggtttcaccgtgttagccaggatagtctcgatctcctgacctcatgatccgcccacctcggcctcccaaagtgctgggattacaagcgtgagccaccgcgcccggctgactattcttataaaatgagttgagacgtgttcactcttctatttaatgaaagagtttgtgtagaattggtatcatttcttttttaaatgtttattcaccagggaaatcatcttatcccagtgttttttgttttggtttggttttttttttaagggtcttaattgtgaattctatttttaataggtaaagggctatttgaattttctatttcttataggataaattttaataatttcttttaagaaattccatttgagactgggcatggtggctcacacctgtaaccccaacactttgggaggaggcagcaggattgctctaggccaggagtttgagatcagcctgggcaacataacaagacttgacttctacagaattttttttcattagccaagtgtggtaacatatgcctgtagtcccagctacttggaaggctgaggcaggaggatcacttgagcccaagagttcaaggctgcaattaactatggatcatgctactgcactccagcctgagcaacaaagcaaggctctgtctcaaaaaaagaaaagaaattccatctgagctgttgaatttaatagtataaagttcagaatatttccttaccattttttcactccttggaggtatgatttacatactgtaaaaatcacttattttcagtgtggagattcttttcctttcctaaatctccacatttttattgacatatactttacatatcataaaattcaccatttgaaagtgtacaattcagtggtttttagtgaatccgtaaagtgtacaactatcatctttatttaattccagaatattttcatcacctcaaaaagaaaccctgtaatcattaaacagtcacttctaattttcttcctttccccagcccctggcaaccattaacctactttccgtcactgtggttttgcctattctggatatttcatgtaaatgaagggataaaatatgtggccttttgtgtctagcatcttttgcttagcatgttttcaagattcttccatttttgcagaatgatagaggagttaaaataagaaaataaagatatagtaagaatgaaactattttcattttttaatttaaaaaaatcttccatgttgtagtatgtatcagaatttaactcctttttatggctgaataatactccattgtatggatagaccacattttgtttatccattcatctgttgatggacttttggattgtttccccttttggctattatgaataatgctgctatagaacattcatgtacaagtctttgtgtacatatgcttttatttctcttcggaatatacttaggaatataattgctaggtcacatggtaattctatgtttaacttttagaggaactgccagactttttcaaagcagctgcaccattttacattttcactaccaaagtatgagtgttccaatttttccatattcttatcaacacttgttactgtctgtctttttaattatactcatcctagtgtggataaagtgatatctcattgtagtttggatttgcatttccctgatgacttacgttgttgagagtcttttcatgtgtttattgaccatttgtgtatctcctttggagaaatgtctatttaaatgctttgcgtgtttttaattggattatttgttttttagtactgagttgtataagttctttatttattcttaatattatacccttatcagagctatgacatgaaaatattttttcccattctgtgggtagtattttcactttcctaatagtatcctgtgatgcacaaagtttttcattttgatgaaatccaatatttatttattttacccctttggttgcttgtatttttgttgtcatatctaagaaatcaatgtcaaatcaaagatcactaagatttaaacctatattttcttttgagacttttatagttttagttcttacattgaggtcattgatccacttggagttaattttggtatatggtgtgaggaggggatccaagttcgttctacagcctatatagcctgcagatgagcaatgttagtgaccttgaaagtagaggcccaggttgtcagtagcctggcatctaactaaacaaccatttatccattaaagttagccctgttaacaattaatattgagataattttacttaatacactgtgtatattagtgtccatctagcatgcagcctgaggcacagagaataatagtttgagtataaaattgaattgaatggaatacatcattaatttattatctagctttctgttattgtataggcagtcacatgtatttaccagaaaaaagttgatagaatttttattttaatgaaacccttttatactttagattattttgatgctgattaacaggataagctgactctggacacatcctgacagcctctgccaaggtttgaaataaacagctgggaaaattcagttttatattatctgttcccgcagctgctcagtttcttctaaccacaggtcagggaatataataggttttccgattagttttagataaaatgtgaaagaacagttcatgtcaaggacaatggttgccaaatatatttggcaggatttctatattgaatcccaaaggaaatacacaaacaaaaccccacaaaagttaggaaggagtaaaacccaggaaccctggaacattttgtcatttactatgcagatttgcctgaaagtgagacaggcaaataaatcacatgtttctgccagcgtggaaaatattcactcaaatggcaaaggtctcaggctggggagctggatattgtcctgtaataggttcatctcagaactgaatcacacacttggagggtgttaatgctcttaggaacatctagttattccctttgaatagagtcctgtcctgaatcacatatacttgacctagggcctaggcctttttgtttttctgtctcacaatcttgtttctccatcaattatgtgttttcactcttccctcagagagggaaaaagtgtttctgtgtgctcttgatcctgttccctctctgatcttccaatctattgctctataacatattttatatgtgtcttatatcttcattttagtcagaaacatttatttatttatttatttatttattttttgagacagagtctaactctatcccccaggctggagtgcagtggcatgatctcggctcactgcaacctctgcctcccgtgttcaagcgattctcctgcctcagcctcctgagtagctggcattacaggcatgccccaccacgcccagctaatttttgtatttttagtagacagggtttcttcatgttggcccggctggtgtcgaactcctgacctcaggtgatcctcccgcctcggcctcccaaagtgctgggattacagatgtgagccattgggtctggcctttaatcagaaacatttaaagtgaaagcactgtggtaacttatgttgaaataccttagaaatcaatggaaactgcacagagagggggtaggatagacgtagtggaaccaaggatatgatatggaaaaaggagaaaggtagcaaactagggatgagttggtgaatgtggaagggcataataatgttaaatgactgaaaactacataggcttatgttaagactagtgccatggaaatttttagaggtagatgacattagagtatgtttaaatataaattaatgttcttgcagtgagccgagattgcgccactgcagtccgcagtccggcctgggcgacagagcgagactccgtctcaaaaaaaaaaaaaaaaaaattaatgttactggttgtgttccctagatgtagactctgagatgaagattaacatgcaggaattttatttggagtgttcttgggatcaacacctgaggaatcagggataggcagagggagaagcgcgctgccgggtaggctccaggacagccttgctggatcttacagggagctctggagctggaatgaaccttccaggttggaccaacatgtccaggcctctgtgtccctgcactgagcactcatgaagtgctgtccatcctgggacagggcagagtcggcgctgggaagaggcgtggtctgcccagagagggggtggggcctgtcctggaaatgggcggggcatgccctggtagaggggcgtggtctgtcttgggaaggaaggtgcgtggcccccacaggcaacattcctctggggcaatcccggcgcacacctcagcggaggtgaaggctgacttcccacacccaatggctgggactggggagttctttcctagactgccatccgggcgcccctcaccctcttgctgctcagctccaggtcgtcgtgggttcagggctcagctgcacgctcctgcccgcgccctgggcgtgatggcacccccagcccctgccattcttccccctcaccccctctccctgccactgctctgcattgccctgggttagcctggcggggccaggtggcacccgccgtatactcttgcctttctgctgcaggggcctttctgctgcgggtcccagagctgcagggaggggcggcagagactccccacgtggctcattggcgggggtgctaatcagagttcttttgctgccactctttgattcccaaaccccatgtaatcttcttagtggggacacagaatcatctttgaattcatacatatacagcaccttggaggctggccctccatcctcacagagacctgcctccaagctggagttctacctgtgcctggttgtggacccactccctcatctcttttgctgtacaatgattccccaggtctacacggtgctatatggaattccacatcagtgaatcaaatcctctgtaagatttcagatagtggtgctggctaaggccctgaagggaggaaaggctaagttacgccaagattaggtatcacaatgaagtcctgtcctttctaggatggaaggagttcagtgtgtctggccaccgagaagctggtttgtctctgtgatggacaataccatattgcagcaatccccaacctttttggcaccagggactggtttcgtggaagataatttttccagagactttggggttgttgggaatggttacggcatgaaactgtccgcctcagatcatgcggcattagttaggttctcataaggagcacaaaacctagatcccttgcatatgcagttcacagtagcattcgcactcctatgagaatctaatgcagcagctgatctcacaggaggcagagcccaggcggtaatgcaagtgatggggagccgctgtaaatacagatgaagctttgctccctgcctgctgctcacttcctgctatgtgaccccattcctaacaggccacagaccagtactggtcaggggcccaggggttgggcccaatatggcatattgggagctcagcattgatttttgttgctggcaggttggactttggtggcaacagtagctagatcagccttagtcagtgggaagccacgcttttgggtccatgcattaattctctccctgctgctgtagccacttagctcatgtcttgccagtactgcgatggcctatgcagaggctagctgatgtgaattgccagagtcatttttatatgtgttgttggtttgtgcttccttcaagatggatgctttctgttggcattaacgtattacttggagatttttctagtttgtgtccactcactaatatgcctttgtcccaacttttttctggaagagcttccttatcagtacgctgggccctggccctcagccagtacagaaagtcatttgtcaaggccttcagttggcagacgtgctccctggactacgtgctttctcgggtgtcccagaaaccctggaatggagtgaaatgcagggctacgtgggagagcagggaggcaagaattaagtcggccccacctttgcccaactcagtgggtctccttgagagaggtctgcagtttcaaggagacttttcagccaatctgctgcgagatcctgtgaaggggtgtgaaggtcttcctctgtgactatagattggccagtctctccttgtgtgtccaacagttttcattatactttatgtgaattaatgcaaaactgctaggtttaaactgctcaccattttagggatcccttctggattttaccttccttaaggggaaattttcctcctttcctcagttcatcctttctgccttggctttgacgtggtctggaggccacagagcctcctcctgagaacctctctctggtgtgtctgtttgtgtccgtccctctcctttcgatcattccctgtggttcctgttgggcgcggctcccataaacgcacagagcagggtctgctttgtctgcaacctgatgcattgttatttctcaccaaaacttgcagtccaaacatcacatttccgggccacactctttgtcagagctccaggggcacaaccccggggacctgctggaaggtgccaccgtgacgtgtgcctagatgcgttttccctcagttaccacagcgttcctctggttctggtggctggagggtgaccgcgtgcttcatgaagggggtccttactgcttcgcatccacccttttcacggaaagcactttgtcacatgttttcagtgtttctaagcgattttctgccaatcttgtgtgctaagattgtgtggcagcgtttccacagatttatagctggcaatgaattctcccaaaggaaatcagacaaaataaaatgtttccaacattgttcacatactgacaacttatgtgcttccttgggtgattttacaactttttaagcacatgaataaaaattattgtctgcttttttctccttttttctctcttttttttcttgcatgcagaaagtttataggagggggatcctctggatcaacacccatgggggagtgaaggaagcaggattgggtaaaagaagttgaggtgatacagtctgaataaaggtcagtcccacagggagctcaagctaggatggctctgcagagatgttctctattgaggcaagttgtctggacctatatagtcccacctttaccaggaataaggcatgagtttggatgtggtgactgacttcagccaaaattggttctcagagaggaattcagattagagttgtcagctgtcagcacacccagcagcttaggaaataagtgctttagtcctgaagcggtgaatctggacaccagcctccactgtggtccaccctttctgctgctcagattcatttgcttcataagttctggaatggttccttcaggattctgatgggctccctttcctggggaaacaaaagagaaaggtttggaacacagcacaactcctgctgctttagcttttcttgagtctgcaactggtactcatcatcttccccttctactacccattctagatccctccccccaccaccctctcaattcatacttctgctgctccaagtgggttaccagataaggtatctggtcatcatgccctttgtaagccatgactgtacttgtccatttatcatcaacattgaacaagggaatactaagagatacccaggcagatgacctggctgccaaatatattctcctctgtctccattgtgtaatgtcagcccttcctcctgatgatcaggatcggttacgcttgccaggatagtgactcttttccttacctcttggtctcttaatagtgatctgaagtaatatgatggcaaccatagtttcaagtttaatgagactcttggtgtgtccactggcggacatattccccttttaagaaccagtacttctaaactctcagagcccagagttgggataagaggcatagtttccctaattgggtcactgggagtaatggtagtgtgaggctgctcctacttacactccttgttttccaaaaccatatattttacttcgggacacaccccactaaacgatggccattgatctagagtatatactgcatcctgcaggatggtgcctcgtccttaggtattatgtctaagctagtgcctcagctgtgccttcaacaagctgtcctaccactctatcaagtgggtagcttctgggtagtggattccatggtcatgtatcttcttgctttaaagtaggtctcttggtctgatgcagtgttatgtaagatcaaatattctgtgaggccttgaatggtggtgtttactgaggctcaccaagcaactgaatgattttcttgagaaatggtgacatatcagagccttagctttggtctctgttactggcaagttgaacattaacaacatcagtagctagatctgtattgatgagtccatgatgttgggcccatgcatagcctctgccatggctcctcctttcatacatccattttgtaagaattggggcaccaacagcagagactggtaagcatcaaagtggctaagtcattcagtctacttggttgtttagtgctgtttctgtggctgatgttcttttcatttattcattctgtaatgcgtatcctttgtagattcaatttccttctctctgaacaacttctttggatatttattgaaaggcaggtctactgtcaataaattccttaatttttattgtctgagaaagtttttatttctccttcatttttgaaggatactttcacagagttcagaattttaggttgactgttttttctttctctcaacactttaaatatgtcagtgcactctcttcttgtttgcatggtttctgaggcgaagttggatgtaatttttatctttgctcctctatggataaagtgtttttccccatctggtttcttacaacattttttgtctttgattttctggagtttgaatataatatgcctaggtgtagggtttttttatttgtttgctcgtttgcatctatctttttttttttttttttttttttgagacagaatctcgccctgtcacccaggctggagtgcagtggcgcgaactcggctcactgcaagctccacctcttgggttcacgccattctcctgcctcagcctcctgaatagctgggactacaggcacccgccaccacagctggctaattttttttgtattttttagtaaagatggggtttcaccatgttagccaggatggtctcgatctcctgacctcgtgatctgcccgcctcggcctcccaaagtgctgggattacaggcgtgagccaccgcgcccagctgcatccatcttctttggtattctctgagcttcctgaatctgtggtatggtgtctggtgtctgacattaatttgggggaaattctcagtcattattgctttaaaaatttgctcctattcatttctgcattcttcttctggcatttccattatgtgtatgttacaacttttgtagttgttgttccacagtttttggacattctgggcccatgcatagcctctgccgttgttgttggtgtttttttttttttcagtctttttttctctttgcttttcagttttgattggaagtttctattgtcatgtcctcaagctcagagattctttcctcagccatgtctcatcaaccaatgagcccatcaaagacattcttcatctctgttacagtgttttgatctctagcatttcttttttattctgtcttagaatttccatatttttccttatgatatacatctgtcattgcatgttgtctactttttacattaaagccattagcatattaatcatagtttaaaaaattcctggtctgataattatgacattcctgccatatttgactctgattctgatgcttgcttgttcagtctcttcaaattttgtgggttttgccctttagtgtgccttgtaatttcttgttaaaaggtggacatgatgtactggctatgaggaactacagtaaataggcccatagtgatgtggtgagatggaaagaaagaaaagatgctcaacatcactaatcattagagaaatataaatcaaaactacaaagagatactgcctcacacccattaggatggctactatcaaaactaaaacagaaaataatgaatgttggtgaggatgtggagaaattggaacccttgtgcactattgcaaatgtacaatagggcagtttctctaaaaattaaacagaattaccatatgatccagcaactcgacttctggctatatatgcaaaagaactgaaatggggtcttaaagagatatttatacatcaattgtattagggttctccaatgaaacagatccgtgtgtgtgtgtgtgtgtgtgtgtgtgtgtgtgtaaatatatgccaatggtaaaagtacagggtctgagtcagaaggcagaaccaagaatgcttatgtccaagggcaggagaagacagatgtcccagttcaaacagggagagtgaatttgcccttcctctgtctttttgttctattcaggccctcagtggaatggataatgcccacccacattggtgagagtgatcttctttaccaattcacatgctattctcttctggaaacatcatcacagacatacctagaaatactgttttgccatgtatctgggcatctcttagcccagtcaagttgacatataaaattaaccatcatatccatgtttataagcagcattattcacaatagctaaaatgtggaagtactgcaagtgtctattgacagatgaatggataatctaaatgtggtatatacacacaaagcattacgaaagaaggaaattctgacacatgctacgacatagatgaaccttgagtatattacgctaagtgaaataagccagtcatgaaaagacaaatgctgtatgattccacttatattgggtacttagagtagtcaaaatgatacagaaagtagaatggtggatgccagagactggaggaggtgagagttattgtttaatgtttatacagtttcagtttacaacataaaattaattctggaggtagatgggagcatattacacgttttctttttggagatgggatctcactctgttgcccaggctggagtgcagttttgtgatcatagctcactgcagccttaactgtctgggctcaagtgatcctcccaccccaggcaccaaagcagctaagaccacaggtgcacaccaccacgcctggctaattattattatttgtagaggccaggtactgctgtgttgcccaggctggtgttgaacccctgggctcaagtgatcatcctgccctggcctcccaaagtactgggattacaggtgtgtgccaccacacctggccagaatatttaatgctactgaactgtatatttaaacatgcttgggctgggcatggtgcctcatgcctataatcccagcactttgggaagccaaggagggtggattgcttgagcccaggagtgtgacaccagcctgggcaacatggtgaaaccctgtctctacaaaaacattaaccgggcatggtggcacacgcctgtagtcccacctactctggcggctgaggcgggaggatcactcgaacccgggaggtggatctcgccactgcactccagcctgagcaacagagtgagaccctgtcaaaaaaaaaaaaaaaaaaaaaagatttacgatagtaaattttatgtgtattttaccacaattattaaaattgaagaaaatccccatgggtcactggtttaccaatttagccattttcaccatttttagattgcattttccttctctatctcagcattctgactaaaggaaaagcaaaatttcttacaagaatgaatgattctccagtgtggctgctcctgaaaggaacaatgagacttttgttatttcaccacaagactgagaaagaaataaacaagtgataaatgcccagaccccttcttattcattccacatcctggtaatctgaggcatggtgtggcttttactccaagcatatgaatacttacaatcagaagctgcctctcctttccctcactttatcattattgccatcatttatgacaatggagggagtgtctcactggatgatatttggggttctttcttcagtggtccgccataccaagcatttatttgtgctgttctccatctttcacatctaccacttttcaaaagtccctgagagtcaataagacatgcgactcgaacaactgcttcacatctaagtgtatgtctttaaaaatctctccttttccatgtttatgtctgatgtgttttgttatggcaaagtggcatgtagtatacggttcataagtgaatcgatgtatatctgtggagggcaaatgctcaattttagatctacacatgaaagcttttttccagggcaggagccttgctttctccaactaagccttaattacccaaatgcccatgtgttgtgcctttggcttgttgaaatgataccaactggtaaaatctgatgggagataaaagttagatgtccagaagcataaaagtcaggaagagaggctctttatggcatagagaaagctgcagaactgctccatggtgtgcaaaactcatcagcacatgaaactagtgagtggagatagtcaccttcaaccactttgtaatttctaccaattcacttggggccagtgtcccttattcaccaagattcacattggtccttttgattatttggcgtgaggaggcccccagacatgctaaactgtcatgcagggagagaggaaaagttgggaaccagcctttgcttaaaagggctttgacaatggaggcaaataataacattttgggaacatttatataagtaattatataatttctgattcagtagctggttcatgaataaatgagtaattgggagtatctgagtggagacaagaatgaacattaatgtaggactgattctgaattacagcttctggcactagtaggtttcaatatacatagtctgctgaaaggtaattttctctgtgatattcctggtatccctaaggagggaagtataattttaggtacatactgacaaaatttgaacacaaggtacttagatgaaagttatagtctgttttagagatgaaattgaaggatgcagtagctattgctttggcaaaggatttttggctgatgcagtgtatggttattgattttatgattcttatcatatggcacctaatgtatcagttgagttgtgaaaacagtgtttcggtttaatggatgttagggatttatatacaacttcaaatttgcctccttgctaatagtagaaaagagtagtatggaagcattacttccagctgctttttgaagtgtccaccaaaatgaacgactttttcctttcttcacgcagatttcctcctagagtgccaaaatcttttccattcaacacctcagtcgtgtacaaaaagactctgtttgtagaattcacggatcaccttttcaacatcgctaagccaaggccaccctggatgggtaatgaaaacaatgttgaatgctatttatgaaattgggtatcttattttctatcacagattccccaatcttgaggttgcagttaaaaagtgcagctgccaaagagaatgtttccctaactgctacctatagggaaatacactgactgcattttctgtctttttgctgggccgtcttcctctgcttggtctatgccaactgcttacctccacttagatgtcaaataaagtatgtaacaacatgttatgacaggacattttctgtcttagaattgttgctgagaattataggtgggaagtatccccttattctaaagagagatatcagcctatcgatttagaacttgttcaggtagtagtccaaaattggttctgcaacccttaggccctgactcacctccaaccttgtataaaaaaaggctaggaacttatggaagactttagatttgaatatttattatttggagagcctcttcggtgttttatgtgttgcttaccccatggggagtgggaggcctgtccctcatgtcaaggtataatgaaggaggcttcaggagaaccacttagaagactggacaaggtacctatggaacttgggagacactgaccactgcctggtttttatctggataaattttcaaggtcagaggccaaaaggacttctcctgatggaatagcagggggagtgggcaatagtgggagctaactgcactaccattgttaggtgtaaggccaggaaggtcactgaatgggacttgtcttacaaagactctgcctgagaggtcttcctgccaggattagataaccccaatagaaaaagcctgtatgggttgtactgccagaagcagaatctgagaggagagatacaagtgaccagctggagaaggtatatcccatgccaagatcaggagcagtggggtgtctccttgttggcagggagaggtctccaaataactcataagttccctaagaaagaaaggcagaattttggtatgtgtcacaactagggagtactaatgccacattatcactgctccttccaagaaagactttgtcattgtgcctatttgtttttaccctcccccctcctttccacttgctcctaccttggcaggtccagagacacaaaggtgagttggggaggaagattaggagaggaaggtgggaaagcagcgaagctgccaaaacaaattacctttacatattgcagatttctggggctgtcagaatgtagctggagaaggaagggaacttgcaattgcagaagacatcaaaaatttggtattagactggactggacttgttagaacctaagagtgatactgttggttaatacctgaaggttactggaaaagatttgggatcaaccaaagtgcaagaaaagggagatctcacataaagtaattaaaagcagtggtctaagaaaaataaggctattttatgtttttatcccactcaatccagttcattcaacagactgtttataggcattttatacttagtgtattcataaaacagagctcttaattttcctcctgattttctgtcatggcctgactaacaacccagttgcacaagccaaaatcataggagttttctttgactcctctctttttttctatctccacatcatatttatgagcaagtcctgttgactgttcctccaaaacaagttccaagtcttcttattttacttcttgtaaaatccaaattcatccaaattcctgtggcctgcaaggtcctacatgttatgtttcctttttgaccatattttctgttactcctctgctgattcactgtgcttcagccacactttacttgactataccaaacttatttctgcctctggacgtttgcatttgttttatctgttttcaatgctcttccactagatctttgaaaatcttgcttctttttcattagtcagatctctactcaaatgtcacctcctcagagaggcccttcctgactactacactgaaagtatcctctacctcctgcctcatcactttctagcagaccactatcttttatatttataacaacttgaaattttcttatttatttctttatgtgcttaatgtcttgagaatatgatctccattatctgtcttgtttgctactgcacctccagtgcataagacagttcctagaatatagtaggaactctagttgaatgaatgaatgaattgaatgattgccagaaatcttgcctcagagcaaccataaggttaggctgatgttggcagcaagcaaatactactttttgtcagtaattacaggggcatgcttctccactgtgaccttgactctaacttttggaataacaggttttctggagtactatccccaagtaacctttggcggacatctcattcttacaggtctgctaggtcctaccatccaggctgaggtttatgatacagtggtcattacacttaagaacatggcttcccatcctgtcagtcttcatgctgttggtgtatcctactggaaagcttctgagggtgagtaaaataccctcctattgtcctgtcattctatgaatagaacagtgagatgtgtgtgctttgtaatggtggcgttacaactcttttaaggtcctaactgaacattatgtgtatttcttaacatttactagattataaatatctcaagatagggaaatccatcttatttattgctgtgtccttagcatataacatattgcctaccctatagtagatactcaatacaagaatgagggtgtagtggacaccagtcattttttcttcctaaaattaaacatttctcacctgtataccccctaggaattgcttttctgaatatacttcaaacagaacctgccattttcttaaagcccatgcctccctagccatagcagttgatctaggagtgagcagttgacacgggtatcccacctccttggccacagttgattggtccagagatgggcaccttacccaagctaggccaatgagagtacttgcactagcattttgaaatttatgagaaaaaggacctattattaccaggtaatcctatacttaggggatggagcccaaatataataaaatcaagattctactacttcatgtatatcatgtgggccatggatcttataggagtcttaagggggtgttggtcttgtccttttcttagttgcctagctctttgcaggcatggtgcaaaggcaggacaatctacctttatctgctccttctataccactgatcctaccctaaacatgtagctgtataatcagagacaggaagccatggcaaatctggagggtctcggcttggctatatcttaaagagttacatgtattcgtagttcaacattggggaaattttccaaaaattggtggagaaacgagtggccaatgcaattttatctttttttttctgctgacatcagggagagataagagctttaaaatcacaattatggggagataatattttaaaatccagctcaagttaaacccatcagaaaaggtaacaccttttgggacccccaaatggccacatcttatccaatgaggggacaccaaccatagagtctatactgcacagttcaaatggtagccatgagctatcaggcacttgaaatgtggtgagtcctacttgagacatactgtaaaatatacaccagatttcaaaggttaagtacaaaaaagactaaaaatatctcattcattgtttataagtacaagttgaaatgcttatatttggatatactaggttaaacgaaatacattattaaaataatttcacctgtttctttttacttttcttaatgtgactaccagaaaatttaaaattacatatgtggtttgcattatatttctattgaacagtgaaatgtttagcatatgttgaagttgctgctcctgatgcagtggctcatctcagatttggccaagttcttctgtccaaggaaaactaggttcaacccattcctggagaggaacagactcaaatctttctgggctgggtcacttaccttggttaaatctgttctccacctattctaccaacaaccaaagggatggacatagctgaaataaaaatcacgcaatcacactgaatggtatctcacctcaggtgggccttcagcattgcctagccattctactgctacatttcccctaatccatttactctccctctccccaagacagctataatgtttcacacattgttagcctctcattgaacctccaacatgtgctcccgcccctgcccccaccacaacgtgagccttgggaaaaagggtatttttttcctaatgaaatatttcaaacaaagataaatacagaaaataatataacaaacaaacatgtgcccatcacctcactttgccaaatcttaacattttgtcatctttgcttaatttattttacaaaattaagcattttacatacagtctgtactcctctatggggctggcaggaaaaggctctcattgtcaaagttcaaagtaattgatcattgaaaaaataatgatcacattaaaaacaacacttatataatagagatacatattgtaatactcataaatgaaatgatatcctgtctaggattggcttcaaacacatccaagctgatgttacaatcattaggtgaattcctgatgtggaatttgacatttgtatggcgccaaaataatatcccagtgatttttttctgattgtaagtggaaatgttaactttagaatggaggtatcaggctaatccacaggtcagttttagtgtcactaaggatgggatggccagatattatctgcccctgatatggcacaatatgagggactcagcatcatctttgatatattttagccaaaaaacttatttaatttgaatctaatcagaacttaggcatattcaatagcatgggatattctacaggactacaagccaaatttctttcaccaaatgagtgtcagaaaaaaagggactactccatactaaaagagactatgggcctaaacaaccagatgcaatctgcagtcttaggttggattctgatttggaccaactagctacaaaggatgcctttgaggcaattaagaaaatttgaatattgcattgatattaggtgatattaactggatcaggtgtgctagtgtcattttgtttatgtgggcaatttttttttaaagatgacttctaaagtatataggagtggactatcatgaaatttgtaatgtacattaaaatgcatcatcataaaaagtgtgttgaaagaaaaaagtgaaagtagcagtgcaattctaagaataattttctaacatccactcacaaaaatattaaattctttatattaaacacatgaaaaagaacacaaatatatctgtctttcaagattcatctcaaattccacctccttcatcaagcattactgaagagtaggaagcttgtttactttttttatccactgtgttgctcgctccaagggcatagagacttctatcttgatctttatattttcagcttgtagctgagtctggtaaagaataagaactcaataaatatttgtgaataaataggtgaatatttccacatggtattataattatatctttatatgtctatgtcccccaccaaacatagtgttgtaccactaggaaagaacaaagtttaagaaattttcttaaatctctctttcttactgttccgtgaccctcactagtgcctaccaaagagtctgtgacaaagtgtatttgttgttgaattgaattaggcaaaaagatgcaataatggaagcaatttattatttaacagaatgtggagatatcaaccagaacctagtttttactgctcatgctagggttagtgatctcaagatcctctggagtatatgaagcttctccccatttgtggctgctgcttgttagtttttcaaattaagatgcagaaagtaggccgggtgtggtggttcgcgcctgtaatcccagcactttgggaggctgaggcgggtggatcacaaggtcaggagtttaagaccatcctgaccaacatgatgaaaccccatctctactaaaaatacaaaattagccgggcatggtggcacgtgcctgtaatcccagctgctggggagtctgaggcaggaaaatcacttgaacctgggaggcggacgttgctgtgagccgagatccagcctgggcaacagagtgagactccgtctcaaaacaacaacaacaacaacaacaaagatgcagaaagtccgtttcttatgtagaacctattggtgacaataaacttgacatgtttctttgagtgtacagtggatatagaaaggacaattttatttcttcctgctataggagctgaatatgatgatcagaccagtcaaagggagaaagaagatgataaagtcttccctggtggaagccatacatatgtctggcaggtcctgaaagagaatggtccaatggcctctgacccactgtgccttacctactcatatctttctcatgtggacctggtaaaagacttgaattcaggcctcattggagccctactagtatgtagagaaggtaagtgtatgaaagcgtaggattgagatgaaataagcagagaagtacaaacaactgaatctatctataacagttagcatttgtgttccttcacctgaaagaggcttttttactctagcatcatgctcatggaaaggagaataatccagtttctgagagaagcagatatgcattctatataaccacaataaactctaagctgggatcaggaggagctgagttccagaattaaatctctctcctcaaagcattgctattttcctcttcaaatctgtgggctttatcagtagtgatttctactgtcctctgccttttgcaaactttgagctaggttccttgaaaacttcatggaggtaaacacatccaagtgtgtgatcaatggcatatagactggttcaggtggttagtttgtcatctgtaaaccaaaagtatataaaaatctaagaaaagtcagcatttatttatatgttactgaaaattaattaatttggattgaattaatatattctaaaataattctaatcaaacctgtttttaatttataccttagcataaattagggaagtaaattttgcataatttgtttttatcctattttttatggtgaaatcagcttcactgtaccttttccttgttccatttatcttttactgcataactccacaatttagtggcttaaaacaacaacagtctcttattatctctcatggtttctgtgagtctcatggaatttgtcagtgttttgacttggtggcctatctaagtgtgtctcatgaggctgtagtcaaacagtggctagagctgaaatcatcccaaaggtgactttattcacatgtctttgaccttggcttgatggtactctccacatgatctctctcacatgggttttacagggtagccagacttcttatatggtcctgagatagcccattagaagctgtttcacgatttctaatgtaaccttggaaatcactcacataacctacattctattagttagaatgcatcactaagaccagtctataaagggagactccaccttttgatggggaataggcaaagaatttattaacaggaatcaccatactctttctgaatggtgatgatgaatgtgattcaaaaaaaggatgggagcggggagtggagaagatgagaaaggtttgtagtttataatagtttcagatgaaagtatgatttctcatatactgagttcagtttcatagtcataattaatgagaaagtgccaaaaccacagtgtattatttatgggatgtaaaggctaatggaacaatgagatcatcaaaacattagtgtttacatatgacatataaagaaataagttaaaaacccaaatgattctttgacacagagttgaactaaagagtctacagaggttctagttccaggtgaaatggataaacacactccaccctttatttcccattgaacttaactataaaaccttgacaaaatgcaaagcccagatatttaaaaatttctaaaaagcaaatagaacaagtatatagagaaaagacactagaattgaaagtattaccaaacttgtgggggagtatacctttttccccactctagtattccttaacctgaattaaaacataactggagacttcgaagtgagtactatgttgcaaagagagctccaggacaaaccctctggggtttcaaggagtgagaaaggtaactctaaatgctcagagagcgtgggaggggaaatcccctagggtttttgtcctcttttccaccattctctcaagcttcagtcccaggttgcctgtggcaatgacagtggctggcaacagaaacctgccggagtaaaaacttagggaggggaacattattcttcattcagtacagctacagatctaagacattgggggaaaagcacattactttctctctgtctttccccttccattgcttgaccttagctatgatgtagttgtggaaattggaagcttctggttagaaaaccaaaaaagggagctcacagaactggaaagtttatagatgacagagagaaaagatcccaggaaagtaaacccataaagttgtgcattaactcctggattcacccccaacctacacatccaggtatgtagtttcagtgtcagatctgttttaaaccccttgcagtgccattgagtccaacgcagtggccagtctggtgcttgaggggaaatctcagtttcacagtcttcaacatgttccattagcctttacgtcccataaataacacactgtggttttggcactttctcattaattatgactatgaaactgaactcagtatatgagaaatcatactttcatctgaaactaacgcccacagaattccttaaaacatgtctgatggctgaaagcaaagatagaacattgtgagataggttttttaatgtatggtagatacaatacataaaagaatcatagcataacaagaggagggtaaggaaaactttatggtccattcaacttcattccaattcaaatggtaaaatgttgactctaagtagatgatagtgaaaggttaagtatgtattttgtaatccctagagcaaccaataaaaaattataccaagagacacagtaaaaagtcacaataaactaattacaatggtatatcaaaaatattcaaataactcaaaagaaggcaagtaaggagagatgaaaatcagagagaagaagcagtaaaatcataataaaatgataggcttaaatctaaacatatcaatacttacattaagtgcaaatggctaaaacacaccaattaaaaacagagattagcatactggatataaaagcttgaaccaattatatgttgtttacaagaaactcatttcaaaaaaatgatataggtaggttaccagcataaagatggaaaaggatatatgatgcaaacatgaatatgaagaaagttgaagtagtacaaatctgtaatcacaacattgatttttgccaggagtgccaaaaccattcaataggggaaagaatagtgtcttcaataaacagtgctgaaacaggtgaatatctgcatgcaaaatactgattgagtatcccttacctgaaatgcttggaaccaagaacgtttcagatttcagatactggaatatttgcacatatataatgagatagcttggggatggaacttaagtctgaatatgaaattcattttggatataaatcccttgccagttatgtgattggcaaatattttctcccactctatagtttgttttttcattcttttaatggtgtcttttataaagcaagagttatatggacaaacatatgaaaagatgttcaacatcattaaccattagggaaatgcaaattcaatcaacagtgatgtatctattagaatagctaaaataataatataaaattgccaagaatcctgtcaagaattcagagcaacagaaagtttcacaatgcacaatggtatagccattctggaaaacagaatggcagttttgctgcttggtagagaaacagtctctggcagtttcttgtgaaattagatgtacactatagagggatagcaggagggagttctttttggatattgaaatggatctgtatcttgacgatgatggggtttcatgagcttatatctttgttaaaagttatagacctatacaccaaaagaaaaagtcaatttcactataattgaaaatttatataaaagtaattagaatgttttaagacagctttatacgtattttaaatgtgtctctaaagtttttaatccagtacttctggtaaagatggcacagggtcttcctacttagccatttttccatcctccacctcaaccccaacctcgctgaaaaccaacaacaaagataggtaaaccataaatagagaaaatcgaataggcatggtcagctgaaaaagaagataaatatttgtggaccagaagcagaacaggaactgtgagtagtaaaaggggtggaaattacaggccaactgagatctgggtcaggaagccagctgcggtagccaaggagtcaggatgacaaggataaatagtgctccccaccagagggactgagagcccatatcatagagttgggctcttcttcacttgaaagagagctgagcacagctgctgctcactctttgtttagggccatggctttgtggaaactcagagtcctagaagaggggaaagcaaacccagtcctagaataggaactgaactaagttttcttggttcagtgggggaatctgcaatatccccaaggtttccattggccagtatctccaaaattccattctagggtatgatttgctagatagagaatagtgaacacatcctttgcttaatcaaccaatgatcacaagggacagcaaagatcactatagttcaacaaagtcagatttattggctcatggcaacaagagactgtggacacctccctaaacaaagggaaatactgtatagagttagtaaagaattttggggaagggtggaggttaggtgatatttaaatgaagcaaagtagagttgtgtgtaaagaaataaccatgaggtctagactgtgaagtgttctaaaaagttaacatagacatgaaaggttaagtcaaggcaccccttacctgaagcttgagctttaaattgagctgcttctttgtgtcaaagtaatttagatgacctaggaaagaatgagatgtttcattcttgttgctattagttcaaacatttctggcaggctgtgaattcagagaacaaacaactcaattgagtaagaaagcaagagataatcaaagcaaatagttggcattcagtgagtttatacagtggcaatgtgtccttgggagaaatggtgttgttaactctgcagttagctttatctatgtctcttatcccagcctgatgagtagcagcacacgtactgttgctttcttagtccaagctaatttttatttctaagcattaagggtgcgagagagagaaagaacggcaaaatgtcataaacaaaaatctttctactcaaaataagcctgtaaacaaaagtttccagtcaaatttaaaaaatatataattctaagaaagatagccaacaagctcaacagttaaagcatgaaacaagctagtttgttccattaaaaacttcagctatcgatatacacggtatttatttaaaatgtgagtataattagaagcactgtgggctattgaaaaaaaatcatgagtatagatgtttaatatggacaattgctattttactcaaaacttttaatttacaattgcagaagtataaaaagttacaagagtaacagaaattatctataatttcactattatcacacagtgtgtgagggcttgtattttgtaagtgtttttaatttttttctttagtaattcatttttatcatattttacacaagtagtggtcttcatcaaagttgaaataaaaaaattctttgctccagatagttttagaaacactgctataggagacctgacatcaaagccaagttatcaagagacagaagactacatttgttcttactgtcaagtaactgatgaagaactgtctcctcctagtgacaatttcctacaatgagattttttaaatagaagataaatgttctcacttctttttcagggagtctggccaaggaaaagacacagaccttgcacaaatttatactactttttgctgtatttgatgaaggttagtgagtcttaatctgaattttggattcctgaaagaaatcctctgctactattaagaggaggtgattatagaaagatcataaattacattactgttcaggaatgaaggagatggggttaaaaatgaattccaagaaaacaaaacgtaacctcagttccactggcagctatgaggtaagaagatagaggagctggataacggactggcctcatccccctcattaagactgtcaacaaatactttgggctctactttctaaatactttctcttatcttcatctattattaagtgcacaacctttggcaagttatttaacctctctgtgtctcggtttcctaaatggaaataatagtacatttttcataagattgttgtgagtgctgagtgatttcacttaagtaacctagagcactgtgtggcatagagtaggccctcaatagtgttagtacctccgcctcttcctcctcctcctaatgtaatcactatgtaatcatagtaacataatattcttcttgcccccttatcaatttacattgccatcttcttaattgaggccctcatgatctgtctcataactctcaaaggaagcttactgaagtgagtatctgatcttgtcactctagcctctacaatacttcagtttgccagtttcggtggctcatgcctgtaatcccagcactttaggaggctgaggtgggcagattgcttgagcccaggagtttgagaccagcctgggcaacagggcgaaaccacatctctacaaaagaattaaaaaatcagccggtcatggtggcgggtacctgtactccagctacttgggaggctgaggtgggaggatcacttgagcccaggaggtgaaggttgcagtgagctgtgattgcgccactgcactccagcctgggtgataaagccagaccctatctcaaacaacaaaacaaataaaataattcaatttcaaggtaaagtgcaaaatgcattatctattctctggtgacatttccagccttgttgtgttccatttcctgccttatcttccatgtcacccaaatatgtaatgctttttcttgcatgagacctctgcatatgcagtttcctctgcctggaaaaatctgtctccctctttacactaagtaagcttctcctttttctttaagtctgacttacttcagttatccccttccttaattccttctcccaggatgacctctagtctggattagatgcctgcttatatttccacagcatcttgagcttattccttatcatactatatcagtattttctactttatttaatatttatcttctttgatctcatatctttttcccttcaagcaaagtgaaatttcttctcctctctgctccctgtaacaccctactctcatctttattatatcactctttactctttattataattatcagcttctctgacgattccagctagagtgtaagcatcttgaaagcagaggctgtatcttcctctctatcatcagtgtctacaattagtagtgctcaataaatatgtgtttgaatgaatgaacaaatgaatggctgcctcataaagttttagcactagctaccagtccttcacacaaaggggtaactccagggagtcactgttcaatagtatttccagtgcttcagcccttatcaatttcagagacagtgttagggagctttcaggttcctggggtttcataaatataagctgggatgaagcaattataacggagacagggactgacagacagcctttttcctaggacaattttcttttttcttttcttttttttttgagatcgagtctcactctgttgcccaggttggagtgcagtggcacaatcttggctcactgcaacgtccacctcccaggttcaagtgattctcctgcctcagcctcctgagtagctgagattacaggcacatgccaccatgcccgcctaatttgtgtatttttagtggggatagggtttcaccatgttggccaggctactctcaaacgcctgacctgaagtgatccacctgcctcagcctcccagagtgctacgattacaggtgtgagccaccgcgcccggcccctaggatgattttcataagctttcttttaaataattcagctaataaaaagaattgaatcctgatgcctcaagctaaccaatattctgtcttctattattatccattcccacttattgtcatggacaaatggagggagagaaaatcagtttgagcaagagatgtctgcctttacataattatcttctccctccctcacactgactttgagaggataagtgctgtgtgcctactttgctgacaaaaatgcttaaggtgtgagcacactgggagcagggaaggagaaaggggaggcggtcattcatgagacacatgcttagctgactctatctttgccttctctctcatcagggaaaagttggcactcagaaacaaagaactccttgatgcaggatagggatgctgcatctgctcgggcctggcctaaaatgcacacagtcaatggttatgtaaacaggtctctgccaggtatgtacacacctgctcaacaatcctcagggtcttccaaattcagcaccagagttctgtacttcagttcacaaacagctcggcatctcagaggatatagcccactgaatacttgaagatctctggcctctggggatcttaatgtatagtaggcaattcctcttttggtcacctgaaaatgaaggcttacccatgtacatacagcccacagtcagatttttctttccttttcttaaatgtgagtgggcaaccaaggatgaacagacatttaaaaagaacctaaaatatggaagggatatgcaaagatgaacaaagaaaataataatcccagaataaaaaaagctatggctcagaacagaactcatcggaagctcttacttctattttcataaagattcaagaagatactgcatcaataaagtaacaataagatgccttccagttttaaaataggggcatagaggcaggctggctttactccctctcacagaaaaccaaaaccaaacatacagcaccaatatctacaccaacaacaacccagagctcacatgtgaggatgagacagttcccggagccacagagaagtgaaaaaactttgagaatcagacttccacatccatgactctccttcctcctattctgcccagcaccaagtgtatggaaaatctcccctcaactcatggtttctacactggaaaaagtgacattgaggtgttcaaccagcttctccaccttcttgggttccctggggggagatttgtccttgccttaacccacagaaaacatcatgactgtctgaaggcagaaatatcccagagtacaggcagagacaaatgagggaggaaggactaccatccccagccctggaaattctgctctataatttggccaaagacatgcaaattcagaatggccgtgcagcagcaccatgctgtagcaggtttatcctacaggtcaccttggcatgaatcactagctggccttccaacactgctatgataatccctttgggacctcacccacttgggacaggcagggctctgaccacttactggaacacctgtaatcccagcacttgagctcagcacaataacaataggagatggctactaccgttaattttatgcagttacgatttaatactggatctttacgtttgtttacatttgtcccaactggcaccttcatcacctccaccctccccaccccagactatggtaaccacgattctactctctattttcacaagatccactcttttagctcccacatgtgagtgagaacatgtggtattgccctgcagtgtcacctatgttgatgcaaatgaaaatattcttttttatggccaaatagtattccattatgtatatataccactgaactgtacacttaaaaatggtaatgatggcaaattacatatgtatattttacatcaataaaaagaaacttaaaaataaggtaacaataggattctatgaaaaacaatcataacaaaacgtgctcataaaaattataaacacaatggtcaaaatagaaactcaatagaaagtactaagaatagataaaatctttcataaggtcaaacaaaatgtggttgagaatatagttgacccttgaacaatgtgggggttggggtactaaccccctgcacagtcaaaaatccatgtataacttttgactccctccaaattcaagtactaatgacctattgttgatcagaagccttatcaataacataaacaacaaatattttgtgtatgtattatatgctgtatattttcaataaagtaagctagagaaaggaaaatgttatttatacttttctctgcttcttgggagtacttccagcatcactagtggcactttatacgggtcccaagtatccttcaaagtttatggagagatgaaatgcttatgcagagatgattagcatcatgcagagttttcagtggatgcctgcagcactcgagctcagcacaataacaataggagatggctactaccgttaattttatgcagttgcgatttaatactggatctttacgtttgtttacatttgtcccaactgggaatggtgccatgtatggttgtaagtatgtaagtttttataaatttcaactttttataatagatttttgtatattttatggtaataaatgataaaatagtctagtatcaacatgtatatgtatatataagtgtgtatacatatatatatatattttttttttttttttttttgagacggagtcttgctgtcgcccaggctggagtgcagtggcgcaatctcagctcactgcaggctctgccccccggggttcacgccattctcctgcctcagcctcccgagtagctgggactacaggcgcccgccacctcgactggctaattttttgtatttttagtagagacggggtttcattgtgttagccaggatggtctcgatctcctgacctcgtgatccacccgccttggcctcccaaagtatatatatatattttttgagacggagtcttgttctgtcacccaggctggagtgcagtggcacaatctgagctcactgcaacttccccctcttgggttcaagcgattctcctgccccagcctcccaagtagctgggattacaggcatgtgccaccacgcccacctaatttttgtagttttagtagagatggggtttcaccatgtttgccaggccggtcttgaactcctgacctcgtgatctgcccgccttggcctcccaaagtgctgggattataagtgtgagccactgcatccggccatctccatatattttttgcattcataacatacctttttcttaatttttttgatatttttaccctatgtggtccatctgacagttttttcaaattgtcataaatttccaaaaaaatctcactatatttattgaaaaaaaactgcatataagtggactcatgcagttcaaacctgtattgttcaagagtcaactgtgtgttttaaagcagattttaacatcaagaaatgatagaaaaatgataagaattaaaagagataaatattcatattagaattgcccatcaggagcttctgagtagctgaacgcatggaggttcctggagagtggctggccccatgccccttcccacatacccttccttatatatgcatctcttccatctggcgtttataagaaaaggtgctgactgctgaattataaggacactgtggtctactagataaaggttgaggagaggggtttgggcttctattgtcttctttccgggccttcatctcctgcttgtgattaagtagtgcatgctgagtggagcaaagtggtggaataggactcttcagcaataatctcctcacagaaacatcaaggtaacaactcgatgcgtgaaattaccttcagaagagttaagaaaacctgaacccatgagcaagactgtgaagcccttttggactgcaaagacgagtaaaaccatagttgcacataaaggggattggttctttatgactgagaccccacccgcaagccactgcagtaccacaggcggaaagtcaccatggacccacggtttttacaccggaaaactctcccgtatggcctgagtgccctctgtggatctccactaattagtagcagagccagcatgagacttgcgtctaacctgggctcagggcgccctctcgtgctaaaaggaaatacaacagccagtcctttcactttctttttgatatggtctctgttgcctaggttggagtgcagtggtgcgatcatagattactgcagtcttgaactcctggctgggctcacacggtcttcccacctcagcctccagagtgggactacaggtgtgtgccactatgcctggctaaattttcgggttttgtgtgtggggtggggaagattggggtattgctatgttgctcaggctgggtctcgaactcctgacctaaagcaatcctccagcctcagcctcctaaagtgctaggttacaagtatgagccaccacactcagccccactcaatttctaaacgagctcactgaaatagagcagtcacaaacaaacccagactgtgaacatgagaataaatacctaattcttcaatgtgtagacagggatgcacatctgcaaagaataagaatagcctaagaaagacagcctcaacaaatgaacaaaaaatcgtgccagtgactaatcctaaagacatgcaggtgaatgatctggtagacaaagaattcaaaatagctattttaagaaaactcaacaaacttttataaaacacagagaaacaattcagaagtttatcaaagaaatttaacagagaaattgaaggaataaaaaaagtcagaaatcctggaactgaaaagtataataaaaaatgacacatgcaatacaagacatcagcaacagaattgatcaggcagaagaaaggatcagcaagctcaaagacaggttatccaaaaatacaatcaggaggggcttcaggatggttgactagatgcatctagtgttcatcccttccatggagaggaaccaaagtagcaagtagataattatactttgaataggtcatctaagagagaacactggaattcaacagagcagtgacaggaagcattgaaagcaagggaggagagagaaataaggcctgtttgcctgggattggctgggagtctggaacagcttcctaatgtggggaaaaggtaagagacccttagtgttcctcattttcaccaaggactcttgcaatcctagccacaggagagcgccttattccttgacagcacagagactagcatagggagttgcctaaagaccgtgtgaaggcattgcaacagagagctcacgctggattctgcaattctcccaagcagctgcagcacagcaccattttgagaacacagcccacacatcctgccctgctatgatggccgtgacttaggcaggagccctgagcagtgatcctgccccacccagcagaggagtgcccatgcattttcacatattccaagaacaaattccactacctacaaccactgctgctgcaggctgctgtggggccaaaacactagtgaaccttgtgctcccaagctacctgcctacagctactccctgagaaagcaaccccaccttcaccaagagcagggctatagcacagctactgctgcaccccaacctgagcattttgctagtgacctcggtatcaccccacccctgcatagcacaaccagcacctcacacaccaccaaggagcctgagggcaggttcacgtagcccagctctacctgcccccagtacccaagcatatcatccaggggcctagggatcacttagccctgtccaccactggtggcacctgagcacctcctggggtctgaggtcaggcccactcaacctgccactactgccacagttagcactcactgcatgcaccacttgagggtctggagactggccatgcgatccatagcagccacaaccaacgccagcacagaccacttgagattcaggttgtttcattgctatgattgccatcaaccatgccactttgctgcccaggaacttgagaacccacccacccatgtgatccatcaataccacttctggcacccaagtaaaccacttggaggcccacaaatcaacctgcctggacctaaaaccagtgcaatcatatgccaccatggtacaccaaagacaagcacactcagcccactgctgccaccattggggcctgaagacaggcctacctggcatcccacttctcagaaaaacttcaccacagcctccactaataaccacaccctaagccactgagaaaatcacaaatatcactgatgctgtttagaatcttatacagaggctactacattcaccgagaatcaaaaccgaagtgctctacccaagcaacaccacagatacatcttcaggaaaaagttctttcctacaaaagcaaattttaaaaattggaaaaagtgattattacaccagatgtgcagatatcaatgtaaggacacaggaaacatgaaaaatcaaggaactatgacactccaaaggagcacaataattctgtagcaagagatccaaataaaaaaaatttaagatgggtacaaaaaaatagaaagaatgaataagacctgctatttgatagcacaacatggtgactatagttaataataacttaattgtacattctaaaataaagagtgtaattggattgttaataactcaaaggataagtgcttgagggtatacatacctcattctccatgatgtgtttgtttcacatcacatgcctgtatcaaaacatctcatgtgttccataaatatatacacctactatgtatccacaaaataaaaaaatcatagtttacaagcaaaacagtatatgtgaccattggtttttaagtaaactggccaacatctctttaaaaatttatgaaatcctggaaaaataattccaaattttgatactaaataaactcagtgagatacaagagaattctgaaaaaaatacaaagaacacagaaaaacaattgaggctatgaaagagaaatttacccaagagatagatatcaaaaaagaaccaaacaaaaattctggaaccaaagaattcattgaatgaaatacaaaatagatttgaaaggttcaacaatagaccggaccaagcagaagagtatcagaactgaaatacagatcttttgaaataacccaatcagacaaaaataaagaaaaaagaattttaaaaaatgagcaaagatttcatgacatattaggcactataaagtgaccaaatatttgaatcttcagtgtcccagaaggcaaagagaaaatgaagaggttagaaagcctatttaatgaaatattagatgaaaaatttccaagtctaccaagagatttagacatctagataaagaaggctcaaaaatacccaaataaatacaatgcaaaaaggtcttctccagggcacattatagtcaaactatcaaaagtcaaagaaaaaaatttaaaaatagcaagagaaaagcatatagtcacctgtaaaggagccgctatcagactaactgtgaatttctcagcagaaactttacaagccaggagagaatgagagagagagaaaaaaaaaaaaaaacacctgccagccaaggatactgtacacagcaaaattatccttcataaatgaaagagagagaaaaatattttcagacaaaaaaaaactgaggaaattcattgcaacctgatctgctttacaggaaatgctaaagggagtttttcaaactgaaagaaaaaggtcctaatgtgtaacatgaaaacatctgaaggtataaaacccacaggtaaaagtaagtatcccgacaaattcagaattctctaacatggtaattgtagaacataaatcacttatatccttagtaggaagattaaaaaacaaaacagataaaaataattaccataacctgttaaagaataagcaatataaaaagatgtaaatgatgacatcaaaaacacaaaatttgggagtcgattttttaaaaaattttcttgcaatcaaaattaagttgttatcagttcaaactaacttgttataactataaggtattctgtgtaagcctcatggtaattacaaagcaaaaatttttataatagatacactaaaaataaaaagcaagggattaaaacatactgatagaagaatcacttaaccacaagggaagagattaagagaggaagaaaggaacaaaggatctacacaacaactagaaaacaagtaaaaatatggcactaccaagttcttacctatcaaaaattaccttgaatacaaatgggttaaattctccaactaaaagacatagagtgtttggttttttgttcttgcgatagtttactgagaatgatgatttccaatttcctccatgtccctacaaaggacatgaactcatcattttttatggctgcatagtattccatggtgtatatgtgccacattttcttaatccagtctatcattgttggacatttggaccgcatattctcactcataggtgggaattgaacaatgagatcacatggacacaggaaggggaatatcacactctgggaactgttgtggggtggggggaagggggagggatagcattaggagatatacctaatgctagatgacgagttagtgggtgcagtgcaccagcatggcacatgtatacatatgtaactaacctgcacaatgtgcacatgtaccctaaaacttaaagtataataaaaataaaaataaaaaaatttaaaaaaagacatagggtggctgaatgaatttttttttaaaaaaagatctaactacatactgcctaagagaaagactttacctgtaaggacacacatagactgaaagcgaagggatagaaacagatattccatgcacatgtaaacaaaaagaaagcaggaatagctatacttatatctgataaaatagacttcaagtcaaaaactataaaaagagacaaacagccagacgtggtggctcatgcctgtaatttcagcactttgggaggctgaggcgggtggatcacctgaagtcagaagttcgagaccagcctggccaaatggcgaaactccatctctactaaaaatacaaaaattaaccaagcatggtggcaggcgcctgtagtcccagctactcgggaggctgaggcaggagaatggcatgaacccgggaggcggagcttgcagtgagccgacattgcaccgctgcactccagcctgggcacacagcgagaatctgtcaaaaaaaaattgacaaacaaggccattatataatagtaaagaagttaatacaacaggagaatgtaacaagcataaatatatatacacccaacattggagcacctaaatatattaatgtttgatctttgtattttctagtctcattaaaagtaagggcaaaaactacaattacttttgcaccaacctaatataaagcaaacattaatagaccaagggggaaatgaagacagcaatgaaataatagtagaaaactttaacaccccactttcaccaatggacagatcatccagacaaaatatcaacaaagaaacactggacttgaactgcactgtagaccaaatagagcaaacagacatttacggaacattccatccaacagctacacagttcacattcttctcaactgcacatggaacattctccaggagattatacattaggccacaaagcaagtcttaactaacttttttaaaatgaagtatttttttcctgccaataatggaataaaactataaatcaacaacaggaggaacaactgtacaaatacatggaaattaaagaacatgcccctaaacaaacaatgggtcaatgaagaaattaaaggagaagttaaaaaatttcttgaaacaaatgaaaatggaaacataacatgccaaaacttatgggatacagcaaaagtagtccttaaagaaaagtttatagcaataaatgcctacatcaaaaaaaaatctcaaataaacaacctaatgatgcatctcatggaactagaaaaacaagaacaaacaaaaccccaaattattagaagaaatgaatgaatacagatgagagcacaaataatcaaaatagaaactaaaaaatacaaaagatcagtataatgagttagttagttctttgaaaagataaaaaaaagtcaataaacttttagccagactaagtgataataaagaagaaaaacagaaataaatcagacatgaaaaaggagacattacaactgataacacagaaatacaaagaattataagaaactactatgaacaactataagccaacaaattgaaaagcctagaagaaatggataaattcctggacacatacaacctaccaaggttgaatcaagaaaaaatggaaattttgaacaaatcaacaatgagcaacaagattgaagcaaaaatacaaagtctcccatcaaagaaaagttcagtacccaatggcttcactgctgaattctaccaaacatctaaagaactaataccaattcttcacaaactattcaaaaaattgaaaaggaagaaactcttccaaaattattttaggaggataatgatcattatcctgatcccaaaaccagacaaaagcacaataacaacaaacaactacaggccaatatcctcaacaaaatactagaaatagaattcaacagcacattaaaagatcatttaccatgatcaggtgggatttatcccagtgatgtaaggatggtttaacatatgcaaattaagaatgaaggacaaaaattatattatcattttaatagacacagtaaaggcatttgacaaaattcaatatcccttcatgataaaaactctcaacaaagtatagaaggagcatacctatatgataaacctacaaacaagatgaaactgagtggggaaaagttgaaagcttttcctttaagaactggaataagacaagcatatccaccctcaccacttctattcaacacagtactggaagtcctagccagagcaattaggcaagacatccaaattggaaagaaggaagtcaaattgtccctgtttggccaggctcaatggcttatgcctgtaatcccagaactttgggaggccaaggcgggcagatcacttgatgtccagagttcgagaccagcctggcaatatggtgaaaccccatctctactaaaaatacacacacacacacacacacacacacatgctagccagacatggtggtgcgctcctgtagtcccagctactcgagaggctgaagcaggagaatcactagaaccccagaggcggagcttgtggtgagccaagatcgcaccactgcactgcagcctgggcaacagagtgaaacactgtctcgaaacaaaaacaaaaacaaacaaaacaaattgtccctgtttgcagaagacatgatcttatatatagaaaactgccaaaactacaccaaaaaactgttagagctagtaaatgaatgtagtaaacttgtagtctacaaaatcaacatacaataattgatagcatgtctatatgccaacagtgaacaatctgaaaaagcaatcaagaaagcaatcacgtttacaatagctacaaaaaatgtccagaaataaattaaccaaggaagtgaaagatctctataatgaaaactataaaatattgatgaaagaaattgaataagacacaaataaatggaaagatatttcatgttcatggattgaagaattaatattattaaagccaaagcaatctacagattcaatgcaattcctatcaaaattccaatgtcattcttcacagaaatagaaaaacaatcctaagatttgtgtggaaccacaaaaaatcccaaagagccaaagaagtcttgagcaaaaagaataaacctggaggcatcacactacctgatttcaaattatactacaaagttatagtaaccaaaacagcattgtgttgacataaaaacagacatatagaccaatagaacaaaatagagagcccagaaatacacccaaacatttaaagccaactgattttctacgaagttggcaagaatacatgatgggtaaagaacagtcttttcaataaatggtgctgggaaaactggatatccatatgcaaaagaatgaacctagaccccctatctctcaccacgtatgaaagtcaaataggccaggcacagtggctcatgcctgtaatcccagcactttgggaggccaaggcaggcagatcacttggggtcaggagtttgagaccggcctggccaacatggtgaaaccccgtctttactaaaaatacaaaattagccaggtgtggtggcacacctgtagtcccagcaacttgggaggctgaggcaggagaatcacttgaaccccagaggtggaggctgcagtgagcctagatcgtgctattgcactccagcctgggcaacagagtgagactctgtctcaaaaaaaaaaaaaaaaaaaaaaaaaagaaagacagaaagaaaagaaaagaacaatagattaaggaattaaatttaagacctgaaactctgaaattattagaagaaaacatagtgtaagcatttcatgacatcaatttgggcaagaatttgttagacaagacctcaaaatcatgagtaacaaaagcaaaaataaagaaattggattacatcaaactagaaagcttctgcacagcaaaggaaacaatcaacagagtgaagagacaacctatagaatgggagaaaatatttgcagattatacatctgacaagggattgatatctagaatatataaggaactcaaacaactcaatagcaaaagtccaaataatcctattaaaaatgaacaaaagacctgaatagacatttctccaaaagagacctacaaatggccaacaggtatatgaaaaatgctcaacatcactaaccatcaggaaaattaaaatcaaaactacaatgagatatcacttacccctgttagaatgactattataaaaaagacaaaataacaagtgctagcaaggatgtggagacaaagaaacccttatacactgttggtgggaatataaattagttaagccattagagataatggtatagagatgcctcaaaaattaaaaatagatctatcatattttctagcaatcccactactgggtatataccaaaaagaaatgaaatcagcatgttgaagaaacatctgcatccccatgtttatgacagcattattcacaatagtcaagatataaaatcaacttaaatgcccatcaatggatgaatggataaagaaactgtgatatagatacacaatggaatactattcatccatttaaaaaagatgaaatcctgtcattttcaacaacgtggatgagcctggaggacattatgttaagtgaaataagccaggcagagaaagacaaatactccatgatctcagtcctatgtacaatctttaaaatttgatctcatagtagttgagattagtgattctaggaagataagggggaagtgggagatggggagagattggtcaatgggtacaatgttacaggtagatagaaggaataagttctggtactctattgcacagtagggtgacaatagccaacaataatatattgtatatttcaaatagaagagaggattttgaatggtctcacaacaaagaaatgacaaacatttaaggtgatggatatgataattaccctgatttgaataattacacaatgtatacatgtattgaaacatcacattgtacccataaatttgtagaattatttatgtgtcaataaaaagtaatacagttaaaaaaataaaattgcccattaggataaataaaaagacccacacacaaaattatcattgtggcatttcagagcacagagagaagatacttaaagcttcttctgagaggaacaggacgcatacaaaagaatgggaattagactggcgatataattaagcaatattgtaaaagatctaagggaaaaattatttggaacctagaatttttagtcaaactatgaatcaattttgggggaagaaaaaagacattttcatatatagagggccttaatagtcactgaatgtgtactatagtaaaaccagaaactacataaaagaggaatttgggagattcagcaacccaagagaataatgaagtatgagggggatgttttctccttagttcttttccgtatttttcaataatttgataataaacatgcataattttataattaaaaaggaaattaattttgacaacatgcaagttcctgttctcacataccttatagtggagggacagattgtagtcaaataagcataataatacatgcaaaattacaaactgagcattactctgaaggaaaattacataattctatgtaagcctataatacaggaatctgacctagactggggaatcagagaaggcttccctaagcaagtaccccttgaacttagctttgaaactgggaaaatgaggcaatgtgagatgaagctgttagaggtattaggaatcaaacctattggggccttctagtccttagtagagagtctggactttattctatgtggaatgacagcctccagtgggttttaggctggcggatactacaatcagatctggaatgcagaaatagtacaccagtttctttgtgggtaaaagtcttagaggggagaatatgaccaactgtagggagacctgtaaaaaaagtttatcagtagctcagacgagataatggtaacttggattaagatagtggtagtagtaacagtgaaaaactagatacatttgaaagcttttagagccaaaataggaggcagctgtgcccttgttgttaccagtgtgggatctgaacacatgactacttgggttcaaatactgagcaaattaattaacctctctgggcatccgtttcctctcctgcaagacatggatgataatggtttctacattcatagggttgttatgaggaatgaatgaattaaaacttgtaaaatactttggacagtgcttgacataaaacaagtgctcaatacatattagctattattgattatattgccctggtcagtgtcaaactgcatatgggagatgagaatggtaacaaggataactctcacttgcatattcaaatgcaggatgctgccattcactgttataaaaaactctggaagagaatgaagtgatgaaaattgtaaatttggttttgaacatgtgggttttttgagatatctaggtggagatgttgagaaagtgattggctgtatgagcctggagttccagaagaggtcagcaggggagacagaagaaggagcagtctgagaagtaggagaaaaaaacccacagagatgttggcacagaggccaagggaagagagagttttaaaaacgaatgaatggtcaacaggtgcaaataaagactgaaaaatgtccattggatttagcagcatgatggtgattggtgaccttggcaagagctgttggtttgatagtagcccaatgttcttgataaatttgtttacaagtcaaggtagcaataaagtgtctaaagtcaatttgtccattctgtcctagcaagtgttttccatttcagattctctacttcatagccataggtgtcttattcctactttacaggtctgattggatgccacaggaaatcagtctattggcatgtgattggaatgggcaccactcctgaagtgcactcaatattcctcgaaggtcacacatttcttgtgaggaaccatcgccaggcgtccttggaaatctcgccaataactttccttactgctcaaacactcttgatggaccttggacagtttctactgttttgtcatatctcttcccaccaacatggtaatatcttggatctttaaaatgaatattataaatatccagtcctacttttaataaaatttactggacaatgtacaggaatatagtgtgttgctgaaggggacattatagagttactgtattagacctcagccaagatcccctagtttccagcttccagtgtaaagtttttaccttgactataaaagggcttgagtattagtaggactcatggatttttagttaaatgtctgtgatggagaaaagatggcttatggatgattgaggtgggaaaatgaggagaatagtatgcccttggtttctcagccttatcccattaattacgctccaatattatggagagaggaactgcaagttgtagctgaagagattttttttttttttggagaaatctagggaaatgggaaaaaaaggcattgtccagattgcaactgtaagggctccactatatcattagtaatgcccagagcagtaaatagcaaatatgacaggctattgtagagcttgacttcagacaccagacagccagaggcactctgtagatacctggcagtagatgagagacacctgtgaaactgagggcaggtcaggagctagtgaattttagaagtaacatgggattgaaaggactatttggtgggaactttggaaagggtcaaaggttctgtgtaagcaaattaggacgatggtaactacagttttaaattattgttaatgtaactttatttgtaactgctagttgtgcaaattcagattgcatcatcatttcaccccaattttccttacttttgtatttattctgctaactcttaatcttggatcaacctaataaccctctttctctacccctctcgtggccattgaaggctcttagtcagtttgtgctgcaataacagtataccacagaatgggtaatttataatggacagaaatttattggctcacatttctgggggctgggaggtccaatatcaagttgcctttttctgcgtcttaacatggtggaaggcattatatgacaaaagggcaaagaaagggtgagagagagcaagaggagggtgagctcactcctgtgataacaaatccactcccatgaacactttccccagataactgcattagtccattcatgagggtggaacgcttatgacctaaacaccttttatatgttcacctctcaataccatcacgatgataattaaatttcaatatgagtttcggaggggacagacattcaaaccatagcaagagttattggagaaaaatgtcggagaggcctaatcttttatatttaatagcatttctttcttcctattactctcatattaaccttctcctcaggttccttggttgacttagaaaagagaattgatcttgccatgcatccaccattttcctccttatgttctattagtgaccttgtttattgtcttctgtagtgattaagaatagaaatctctcttccccatgtgtcacataatatttatggaattttgacaagaccttagtggacaaaatgtgtcatactgaatgagtaacaggaagttgatgcacaaacaacattcttgcaggcacagaggaataggtcatttacttgtatatgatcattgtcaatcaatcattgtccagttggaccccgattcagtttattttttgttttgtttttctccttttcacagattctatccactaattttaatctttatttttcagaaaaaaatgctttatcttattgaacctcagaccaaacactttgtttttcgatgcagactgagttatgtttaaggctacatgaaccccagactagttgtttgctgctcctaaaaccttccctgttcctcataatcaagtaaacaggtctcccttcttagaagtatttgatcttcaaaattgccctgtggtataaatagggcaggaattattattatccattttacaaagcatgaagatgagactgagaatgttgaatacatttgccatagggtttacaactagtcacaggcagacatgctcttaaaatatatatctccttgattttaagttgtatcttgtcatggttttatgaacttggaacatgtcttaaagtttatatctacactaacatttttcccaataagctgttattaaatcaatgatttgtggcaagaagggatagtgatgtggaaagggggggtacttaggggagagcctggaaggcctaataagagagaaagaagtcataaaagttaaggcaagtgatatggtttggatatttatcttcactgaaatctcatgttgaattgtaatttccaatgctggaggtggggtctggtggcagatgtttggatcatgggggtgaatccctcatggcttgatgctgtcttcatgatatttggtcattcagaagtgtgtggcaacttgcactctctgtcttgctcctgctttcaccatgtgacatgtctcctcccccttcacctacccccatgattgtaagcttcctgagacctccctgaagccaagcagatgccagcaccatgcttcccatatagcctgcagaaacatgagccaattcaatctcttttctttataaattacctagtctctggtatagaacagcctaatatagcaagacactctgacattgtttggtttgtctgactccagatggcatggaagcttatgtcaaagtagacagctgtccagaggaaccccaactacgaatgaaaaataatgaagaagcggaagactatgatgatgatcttactgattctgaaatggatgtggtcaggtttgatgatgacaactctccttcctttatccaaattcgctcagttgccaagaagcatcctaaaacttgggtacattacattgctgctgaagaggaggactgggactatgctcccttagtcctcgcccccgatgacaggtaagcactttttgactattggtactctctcttccccatactcaaaaagttcttaccagttattcaaaccaacaaatcctgaagccatgtttaaggttaggtacaggtatggaatcaaatggcaagggtattaacatttggaaactaacatagctgagcatcagagaagcttgtatttttctcactccttgccttgattgaatcatataagctgttttagagttggatttgagcctacctagaatttttcttcccaacctctcatctttttttctcttatacagaagttataaaagtcaatatttgaacaatggccctcagcggattggtaggaagtacaaaaaagtccgatttatggcatacacagatgaaacctttaagactcgtgaagctattcagcatgaatcaggaatcttgggacctttactttatggggaagttggagacacactgttggtaagttgaagaaaagatttaaggtcaggtaagaagaaaaagtctggagagttttgagtttctaaaatacctcataattcagccttgtctccaatggacatgatcttttaaaagctataaatgttacacaaataatagctgattgtatgtatttaaagtttgagtatatagaataaaaatttaatgtcacccactaaactcgacactcctttgaaatactgcttagactttgatacatatccttccagatctttctccattaattatgtcatataggagtcagcagactatggcctgtgaaccaaatttggcttgtggcctgcttttgaacagtccatgagcttagatgagattttacatttttaaaatattgcaaagaaaagaaaggaggatgggaggaaggggaggagaaggcggaggagcaagagaatatgtgacagaggctagatagggctcacaaattttagagtacttactatccagccttttccaaaaaatgcttgcttgctcctgatctaggatattaagaatgagtatggtgtaagtaacagaatactcaatggacagtggtttaaataaataagggtttattttcttcacaagaaatttgaagattggtcgttggttccataaattcagccgctgaagaatgtcatgaagaacactggtttttagatatggagttttgttagatactgccaaactgactttcagcaattttgtaccaatttatatcccctaccataagtatatgactgcccttttccccacaccattgccaacaacatatattataaaccttcagaaaattttccaatttgatgagcaaaatgtttatatgttgtcttcatttgcatttccctggttagtggtcaaattgtatattgtttcatgtttgttggctatttgtataactccctctgtgaattgcctgcttgtaaattttgtccagttttctatttggtcagtcatcttttgcttatgtatttgtaaaaggtctttatagattatggatattgacacattgttatttatctttcaaatgttttcctcacattgtcacttgtactttaactcctttatgatattttttgtccttcaaagatttttcatctttatatagtcaaaacctcctatcttttatcaatcttttcatttatatgtctctggatctttttcacttatgttttctgcctgagaatgtctttgccacccccaagacactacaaaaatagtctatattttattctcttacttgtatagctttatttttacagtgagcaatctaattgccctggaagttacttttgaatgtagtgcataattcaaatagaaattttcccaaatggcagctgacacaaccaatccttttttcattaatttgaaaatgtcttctttatcatatactaaattgctaaaatctgggatttttaattctccttaactaatctgttaccaccctgttttaatgacttcaactttgtgatatgtttgatatctgtatgacatcttctttcattgtacttcttcaaaatttttattagctattattgtacaatttttcttcataaattttgtgtacgtattttttctatttttcattttttgaagattgtataattttattttttattcattaatttttaaaatgcataatgacacaataattttacatatttatagggtactttttgtgtattttgagttacttttactggctaatttaaaaatagataaacaagagcatgcaataaaatgtaaattttcctccctcttggacttccaaccccatagtctgacagacagtcattgctgtgggtttgtatactcccctccagaagtagtgcatacatgtacaaatgtgtgtgtgtatgtgtgtgtgtgtgtgcatttcacacaaaaacaagagcagtgtaaattggtctgtaccttgatttttaaaaggtaacaatatattttgaattagccaggcatggtggcacatgcctgtagtcccagctactctggaggctgaggcaggagaatcgctcgaatctgggaggcggaggttgcagtgagctgagatcgcaccactgcactccaccctgggcaacagagtgagactctgtctcaaaaaaaaaaaaagtaacaatatattttggatatcatttcatgtcaacatatatagatctaccccattctttgatttattcaggttatactctggataccatgctgaatcctacacttaaacattacctcaaaatggatcaaagataaaatgtaagagctaaaactacaaaattataagaaaacaacaggataaatctttgtgatcttgaattagacaatagtttattggataggacaccaaaaccaacaagcaacaaaagaaaaaccatttgacccagccatcccattactaggtatatacccaaaggaatataaatcatgctgctataaagacacatgcacacgtatgtttattgcggcactactcacaatagcaaagacttggaaccaacccaaatatccaacaatgatagactgattaagaaaatgtggcacatatacaccatggaatactatgcagccataaaaaatgtccccgtttgcagatgacatgattgtatatctagaaaacaccattgtctcagcccaaaatctccttaagctgataagcaacttcagcaaagtctcaggatacaaaatcaatgtgcaaaaatcacaaacattcttatacaccaataacagacagagagccaaatcatgagtgaactcccattcacaattgcttcaaagagaataaaatacctaggaatccaacttacaagggatatgaaggacctcttcaaggagacctacaaaccactgctcaacgaaataaaagaggacacaaacaaatggaagaacattccatgctcatggataggaagaatgactgggttttaagacaagagcagaagtggaagttgcatttttatcctcatatcacacacctcagatctggaggtgggattgatattttcagggttcttcgctgcagcttccatgttattgctcttccattctctctctctctctctctctctctctcgtctctgtctctctctctctctcttgagatagggtctcattctgtcacccaggctggagtgctgtggtgtgatcacagctcactactgcagcctcaacttcctgggctgaagtgatcctcccacctcagcctcccaagtagctggtactataggcatgcaccaccacgcctagctaatttttttattttttgtagagatgaggtctcactgtgttacccaggctggtcttgaagtcctgggctcaaacgatcctcctgcctcagcctcccaaagtgctggcatgagccactgcacctaggcctttgttttcttttaaagctggtgcaatcaggcaataccacctgctacccttgcttaatactgtaatcaactgtcctcttggtcatgcctgctcatgcactgaagattttatctcctgaaacactgtctctttctctattatcagtgaatttaatgcccaaatagtaataaaggctgagaggaagcagtgtcctcaccaggcatctaaatttcaattagtgtgagaaggtgcagagaatacttcctgaagcaattgaaacaatttttaaagaagtggaaaggggcctttagagagaaacctaagtactgtcagccctctacattgtcaactgaagaatcctaagtttgtaaatttggagtggaaagggttgcaggctgggaagtgtagcctctggcagcaaatggaagcaagcactttgaagaaggaaggatgagataagaatttatgctgaatgagttggctaagtatacatatttaacaggttccaggaggagctgtgaatatttatgatggggcacctgcaaccacacatgttacatacattccatgttcactttggggtggagacttaacatttagatgcatgaaaattaggctgtatatgtcaaaagatgaaacagaggacacagaggcagcctctgtaaactggccagagccagtccatggtcagtggtctctcatcaggaagcaatgcttctcggttgttatgataaaactgcacaaagggaggggaatccaccacgtctttagaaaggactggtttatgtttaacccttaagaaagaaagtctaacggcagattagggagggagggaatgtaacaaggcatgcccgatctcccatcccatcatggtcagaaactcagtttttaagccatctctggggtctccttggccgagaaaggggtctcttcagtcgtttggggatgcttaagattttatttttatttttcagtatcactggatttctagtctcatattcaaacaaccattgattgaaagtattcaaaaaacaaccccaaaacaataaaagataataatacaacaataaacaataatacaaagaaacaatacggtaaaacaactatttacatagcatttatgttatattatgtactgtaagaaatctagagacgagttaaagtacatgagaggatgtgcatatgttatatgcaaatactacatcattttgagtaagagacttgagcatcacagattgtggtatctgcaggggtcctggaaccaatcctccatgcatgccaaggaacaatttcatgaaaagaccaaatattttgagttttatctagcctcaaattactataatgtagatagaggccacttttatttatctggagttagaccacagttttcttgttgatcctagtcgttttaggatttgatcttagatctcgcttatactttcagattatatttaagaatcaagcaagcagaccatataacatctaccctcacggaatcactgatgtccatcctttgtattcaaggagattaccaaaaggtaaatattccctcgatttatagctcttttttacctgtagatacagatgagataaatatcatcaataacaactaaaattatgttggtcctttctccagctgttggccggacctcaagctccagtctaaagttataaaaatcaattataggaatcctcaggtgatgtttcatgtaaattcgtgaagagtcgcctgacatgtttttcctattacctagcggtgatgttcaaatattccacagccaattagattccactgcaattggttccactgcaactactgtaaatgccctaaaatcttgaagctggttcttctggcacttaagataatttttttttctgagtacggttttcagctacattccacacttttggtatctagtgtggtattccacactttgggtaactagtttgatattttcaggattctttgctgcagcttccatgttattgctcttccttgctctctctctctctctctctcaacagggtttcactctcacttttggtatctagtttgatattttcagggttcttcgcatattcatttctaaatagttcacaactccagtttttatttactatattgtttgctgtttaaagatttattttttcttttagtagattggatgttatgtatattctttctattatttaattttggatgaatatttatcaaaataatagatgtgtatgcttaaaactacaaaagggctgcctccctagaggcatccatttttaagaatttctgtttttgatttttggtggttatctctacatctctaaaaagttacttatactgctaactctttgtttttcaactttagacattatatacttactttgttttgtgcttttttccattcaagttgtttcagttttatcagtgttttcagttggattggctatcattagaactttaaaaatatactaaacatcaacttttagtaagatattttccaatcatggattgaaaatatcttttgactccatacttcataaattaaggatattaaaaactgtacccctcacttttcctttccccaaacctttcttttctctactgctgctagccattcctttacttttacaaaactaaacttgataacatttacattttgtgctgtaatttgaaataactcttccttgctttgtctatatattttctctaaagcttaaaaaattaaaaaacagcatttgtattattttagtattttagcaagtttcttttcataaatgttaactgcagaactgggtaatatgctatgattgctctcttttctacagctcaagtgattttactattaagataaaataatatgtggaaggaaaaaagttgatctcatagaagtagagataaaatagtggttactagaggctaaagaggggaaggggagggggaaatagggagacgttggttaatggatgcaaaattccagctagataggaggcataagtcctaatgttctatagcactgtagggtgactgtagtcaacaatgacatctattttcaaatagctagatgagaggatttggaatgttcccaacacaaaggtgtatcctgaagtaagactttgttttcttttattcggaaaagaaatgtaggcttcttcaaccctatttcttaggcctttcagcttcttaatcattctatgtattgcttgctatccaaatcttttattttttttttgagacagcgtctcgctctgtcacccaggctggagtacagtggcacgatcttggctcactgcaacctctgcctcccaggctcaggctatcctcccacttcagcctcctgagtagttgggaccacagacgcacactaccatgcccagctaattttttttattatttttattttttgtagaaatggggtgttaacttgttgcccagactggtgtcgaactcctgagctcaagcgatctgcctgcctcagcctcccaaagtgctggaaccaaatctttttcttcttaaagacattcttgtagtgaatagcattaactacttttcccttgtacatttctattttttgatttcttcttttgtttttctggaagtatattctcaagtaacttctaaatatgtggtacatagagggtgaactttctgaatccttcagtatcacatgatgggcagacagactggttataaaaattttcccgctgggtgcggtggctcacgcctgtaatcccagcactttgggaggccgaggcgggcagatcacttgaggtcaggagttcaagaccagcttggccaacatggtgaaaacccatctctactaaaaatacaaaaaaaatagccgggcattgtggcgtgtgcctgtaatcccagctactcaggaggctgaggcaggagaattgcttgaaactgggaggtgaaggttgcagtgagccaagatcaccccactgcactccagcctgggcaacagagcaagactgcatctcaaaaaaaattccttcccctgttttctaatattcattattgccgataagaattctttatttgcatttctttatggaagaatggcatagtgacagagttctggggagattttgaatgtgtgtcccgaaatttggaggcatacgtggatagttactggtaacctgcttttccatggagaattttgaaggctgtaatgcccataatagtgggcaagaagagagggcaagagtggagcagtttaccttcctgctgtttgacatgagtttattctgtaacaagtgaatactgttgaaagtagctgggctttatcccttttgaagatattctacccaagaaggcagttaggcaggctgaggggatagcagaaccaatagagtcttggatatatcactggaagtaagaagagctgatggggagaggagagttgcagaaggatagctgaaagaaacatctctcatgtcatggaactatgtaatgctgaggtccccatggtaactctaaagaaaccatacatgtgtcctatgaaaagaccagcatttgggcacctcccacacagagaacattgatgaccaaatagtgttgtcaaagatagagcagcaggacctgttaaacaagagtctgtttgccctttcttctattacctaccctccctcacccccagctcctggaaaagggaagagaaggctcagaaatattgaaagaacatactacaccattccctttctttctttctttcttttttttttttttttggagacagagtctcgctctatcccccaggctggagtgcattggcatgatatcggctcaacctctgcctcccaggttcaagcaattctcatgcctcagcctcccaagtagctgggattacaagtgcctgccaccacacctggctaatttttgtatttttagtagagatggcgtttcaccatgttgaccaggctggtctcgaactcctcacctcaacaccattccctttctatggatcctctaaccataggtcaggcataacttactgaggtgaggaagagcttagaatgaatataaaattaaaattttgatttagattgtatcttcaggtatgaaacatacccagaatgagacttaattactaaaatcagttcttgtcctgaggacccattaccctgagggcagatctcagttcttgctccctttcctcacagaagtcagagactacaccttaaaactccaatgccaagctctttggcatatattcaggcctgacactttcacagtcaaccggataatcaattacagctttttactttttaaaaaaattgtttgaatcttaaaattataataggtgcgactttagcttccacttgctcagaaacttcatatgtacatacagatttgtagaacccttgcaacaacaacatgattatcaatatgtggcttgttgtactctaattgagctatttatggttttgcttgtgggtaggtgtaaaacatttgaaggattttccaattctgccaggagaaatattcaaatataaatggacagtgactgtagaagatgggccaactaaatcagatcctcggtgcctgacccgctattactctagtttcgttaatatggagagagatctagcttcaggactcattggccctctcctcatctgctacaaagaatctgtagatcaaagaggaaaccaggtgagttcttgcctttccaagtgctgggtttcattctcagtgtatgtccccttataacctgaagaaaatataatggtttgcaatataggtcagtaaaagaaatgagcttagcttttactaaatttgagtttcacgtagtaaacgtgcctgctggatggataggccatagaatgtaggccctagatttttcctatagtactcattcccagtctgggatttagctctctctagctgatcctccccatttttatatgtccaattaccacctattttcagatgacccacagatttatatctacagcctagatttcttccatggacatctcattatgggtgactcaaaagtacctcaaaattaacatgtctgcagcatgtagcactgttgcaggaagtcagggaccccgaacagagggactggctgaagccacggcagaagaacataaattgtgaagatttcgtggacatttattagttccccaaattaatacttttataatttcttacgcctgtctttactgcgatctctgaacataaattgtgaagatttcatggacatttatcacttccccaaccaatactcttataatttcctatgcctgtctttactttaatctcttaatcctgtcatcttcataagctgaggatgtatgttgcctcaagaccctgtgatgattgcgttatctgcacaaattgtttgtaaagcttgtgtgtttgaacaatatgaaatctgggcaccttgaaaagaacaggataacagcgatttccagggaacaagggagataaccataaagtctgactgcctgcagggccaggcagaacagagtcatatttctcttcttgcaaaagcgaataggagaaatatcactgaattctttttctcagcaaggaacagccctgggaaaagaatgcattcccagggggaggcctctaaaatggccgctctgggagtgtttatcttatgcagttgaagataagggataaaatatgccctggtctcctgcagtgcccccaggcttgctaggattaggaaattccagcctggtgaattctagtcagaccagttctctgctcttgaaccctgtttcctgttaagatgtttatcaatgacaatgcatgcacagcaggacatggaacctcattagtaattctaatttcgccctaccttgtgatcttgctctgtccctatttgccttgtgatattttattgcctttgaatcatgtgatctttgtgacccacaccctattcgtacactccctcccctttgaaaatcactaataaaaacttgctggttttgcggcttgggggcatcacagaacctgccgacatgtgatgtcacccctggagacccagctgtaaaatttctctcttttgtactctttctctttatttcccagaccggccgacacttaggtaaaatagaaaagaacctatgttgaaatattgggggctagttcccacaatatagcacagtgcatctcacttagtaagagcttaataggctacgtgcggtggctcacgcctgtaatctcagcactttgggaggccgagacaggaggattgcttgagctcaggatttcaagaccatcctgggcaaaatagtaagaccttgtctacaaaaaaaaaaaaaaaaaaaaaaaattagctgggcatggtggtgtgtgcctgtagtcccacctactcaggaggctgaggtgggaagatagcttgagcccaggaggtcgaggctgcagtgagcctggatgacaaagcgacaccctgtctcaaaaaaaaaaaaaaaaaaaaaaaaaaaagcttaataaatacttttgggcaaaacatagggaaagatataaaatatttcaaaatatggctagaatttggaccatttctactgctttaaaaaataaagctaaattctctgaacaagaaaagcttagttcttcacaaaaactcattgctcggccccagaataactcagtgccatattgctgaggcttgactacatgtccatttgattatatttatgatacataagatccctactagtctgaaaacatttcatatgtttagagagtaaagtatatgaactttggtgccaataaaacacatggcacataaactcagagaagtataaattttgccaagtacttgtcctgaccgatttttcctaactatagttttttcgtcacttttgggaagagaactgaaatattattctatattctccaatctcctctcttcagtattttggtttatatagctataggttataaaaaatgaggtttatacatattagtgaggtttacatatgaaatcttagcagatccaattagcaagcgactaattcataaatctggttcatatacaaaatgctcttctgaaaaaaatttgaatgttttaaacagaaaatttaaggtattagtgttgtttgacatttttgtggttcaccttatctttcttatttgatttctgtttttctatttttaattttttatagccttgtggaaggtcagttgctagatggaagtttaggaaagtcagtatctcatttgacttaactaacttaagaaaggcactgaataaccacttggttctttaaggagttaaatcttctaatctgaacatgaagagaataaggctacagactgtaccaaataaatcagctagcatatggccttgggtgcagaaaaaactaagttcagtgggatcagtcaccctcttgtcctggggacacatttgttgtaagcatatactcactgctcatagcacccaccctcaactcccaagccctggtacatgcctaagaggaaatggaattaaaccaatggattagatatatcacatgcatgccatcgctttcatcatagactgctagctcctacctgacaacatcagtagcatttctttacccctttcaatatatgtaattaacagataatgtcagacaagaggaatgtcatcctgttttctgtatttgatgagaaccgaagctggtacctcacagagaatatacaacgctttctccccaatccagctggagtgcagcttgaggatccagagttccaagcctccaacatcatgcacagtgagtaaagcagcacttaagtccagtgggtggtgaataaagaaaaattgatgtaatcaaagtgatgtccagataatgaatgaattgtatgtgcacataaatttaacaattatgttacctataaatgtataatttttactcaaacacacgtgatcatataacccatattttaaaaatccagtcaccattttttcctttcaatatttacttgatttccctctcccttttaattccctatctccttctatattacatcttttcaccaaccattccatgcccaggtaacatattttaagacatattttctctataattatataatcatatataaacacatacatacattgtattagtcttctagtgctgccataacaaagtactgcagactgggtggcttaaccagcagatatctattgtcttacaactctggaggcttgagatcaggatgtgggcaacgttggtttcttctgaggcttctctccttgtcttgtagatggctttctcccttgtcttcacatggtttctcctttatatatctttgtcctaatctcctcttctaataaagataccagtattgttgggctagggcccaccgtaatgaccttattttaactaactacctatttaaaaacactatctccaggtatagtcacatgctgaggtactggggtttaggactgcaaggtataaatttgggatgggggaacacaattcagcccattgcatacatacacatgtgtatatatttatatataccacaaatctgaatggtcaaaaatatggtaaaaaattccaattgcactatcctacagggaaatgcgaaatagaataacaataggatagcactttatacccatcaaactgccaaaattataattactagtgggcttgtggataaaagagtgttctcatgctatattagtggataagtagtatagtcttttcaaaaccaatatatgccttttgaaattctgattattaagatgtttaagatggagtgagccacatttccctgtgtgtcccactggatgcaactaaaaatcctgaacaggccgggcacagtggctcacgcctgtaatcccagcactttgggaggccgaggcaggcggatcacgaggtcaggagatcgagaccatcctggctaacatagtgaaaccccgtctctactaaaaatacaaaaaattagccgggcatggtggcggccgcctgtagtcccagctactcaggaggctgaggcaggagaatggcgtgaacccggaaggcggagactgcagtgagccaagatcgtgccactgcactccaggccggcgacagagtgagactccgtttcaaaaaaaaaaaaaaaaaatcctgaacgaaatgcatgggaaccttgaaaagttataatgtgagttatactcacctaccagaatgtggcatatgttacaattctatgcccctcctctcaaagctttagccctttaactttgggttgagcctcatatttagcttgaatttctagtaatagtgatatattattctccagagttaaagtcctttactatccattattctaaaaattttaaggttgtttagtcctttgagttgcatttttattttttacatagttcagggtattgctttccttctgaaggattcagatttcacatttgtgcaagagtctaatgcttagtatttaattctagtggcacagagctttttcttttctccctcttctctccagcctcatggctttggtttagaattccttcagcctgatagaatattgtattttataatttccttattgtgctatttactagatatttgttcttctatttttttctattcataatttctccctttcccaccacatctttttccaagtaggatgtgcacttgccacagtatctggacagttaaactgtctcattttcttggagacggtgatgaaaactagagagatatagtgacataagcagagccagaaaacaatttcactgaagatgatatatattttttttcctctgggatttctaatatagcttttggtggagataagagtctggaattgagaaagaagagattggaattgagaaaaagagtctgagaaagcacagggagagacacaaaggcagagaccaagagacacaggggaaggatcttcagaggaagagtccagggagaaagatgctaagacagagggataagaaaagaagaaaaaaaaggaccaggaggagagagacccaaaccataaatcactcctatttccattagcagtaaaattgataatctattttcatacaatgaaataccatgtgacaatgaagattcacaaaaataaagctatacacaacaatatgaataagtatcacaaagacaatttttagtaaaatggtaagtgtcaaaagaatatatacagtattatattatttacataaagttcaaaaatgggcaaaattaacttatatagtttagggatacagaggaagaaaagtataaaggttagtaaggacatgattataataaaagacaagatagtggctacctcttagaaagagttcatttgagaataaacacatgtgttttgtggggatagcagcaatattgtatttcatgacctagatgtttgttttataattttgtgttttaaaaaattgtaggatttatgatttatttcgtagatggatcctacaaatgatagggaaattgcagtaggaatgaagaggaaggaacatgtacaggatttgtttagaagatagaaggcacatgattttgtaaataattagctatgtttggtaaaggactaagaggattcaaagatgattaccaaatttctgatatgggtaactagaagaagagtgagacaaaatggaagaaagtgtatttaaagaaatgatagcaaaaactttccaaatctggagaaagatgtaaatatccacgtacaagaagctcaaagatctctagtcagattagattcaaacaagactatatgaagacacgttacaatcaaactgtcaaatatcaaagacaaagagagaatcctgaaagcaacaacaaaaaagaagcaaaccacatacaaggaaattccaataaggcagaaactttacaggtcagaagagggtgggatgatatattccgagtactgggaaaactttacctagaaaatgtttccttcagaaatgcagagagataaagactttgccacacaattccagttagacaagagaaataaattaaagacatctattgtacactatggtgactacagttaataaattacccattccaatatatacatatataaacattgtgatgtacatcataatatattctatttttccctgtcaattaaaaaataaatttaaaaagattggatagagaagaatcagccattctagtaattaagcctgaggaagcttacattccagtgatttcagataaccattatgcaagttaaggaataaactggataggatgatattaaaaaaacaaaaccaccaatgagatacaccagaatggctaaaattaaaaaggctgtccataccaagtattggtaaagatgtagagtaatgagaactctcataaatttctggtcaggaaatccaaacatcgaaagccaaacatcggcataccctattgactcaggaaatccactcctagtatacacctgttatgtcctgaatcatgtcccctagaattaatatgctgaagccctaacactagtatttcagaatgtgactgtatttggagatagggtctttaaggggtttattaagttaaaatgaggttgttacaatgggccctaatccaatatgactagtgtccttataagaagaggaaatgtgggccaggcacagtggctcacgcctgtaatcccagcattttgggaggccaaggcgggcggatcacgaggtcaagagatcgagaccatcctggccaacatggtgaaaccccatctctactgaaaatacaaaaattagctggacatggtggcgagctcctgtagtcccagctactcgggagactgaggcagaagattgcttgaacccaggaggtggaggttgcagtgagcagagatcacgccactgcactccagactggcagacagaccgagactccatttgaaaaaaaaaaagaagaggaaatgtgtacacacagagacaccagggatgcatattcacagaggaaagaccaagccaaggagaggtgtcagtaaaaaccaaacctgccaataccttgatcttggaattttagtgttcaaaactgtgagaaaacacattcctgttatttacacctcccagtctgtggtatattgttatggcaaccctagccactagtacagcacccaaaagtagtgtgtacatatttcacaaaagacatgtaactatttaatccatgtggagtgtcaaaaggcaaaaatacaacaaatgtattttaaagattgtaattggcttttatacatgattctagaatcagatagccctcagaaccaaatacagaacagcagccagcaacatagtatggatagaaattggaagtgaggtttagagacagcttaattgattacagttgggcatttttgccttatttgaagctgttagtcgcctgcaattgatggaagttcagctgctataatcggctgagactgagctgtttgttataaaagcatattcctaaattaggctttcagttagttcatcaactaagccaggctgcaactttgttgtgcaaggactcaagtgcaaaggtacccttaggcaaaattcagattaatttaaaaggactttacttttgttagttatgtgaaatgaagtggaatctattttttccaagtggatagtcatattttctattatcatttaccaactagctgatttttttcctgtactggttggagatgctgcctttattatatattaagtttcaacttattatatattaagtttccgcttacatcttgtcagtttctggactccatattttgtttgatatatttatctattctgcattaagactgcatttttaattataatagctttataatatctcaatgttgtataggaaaaaaacttcaattattaattagttatactaagccaatgtctaagtattgcttagtggtttgtgggcaaccatcttacacagtacctagtaacagagtagacaagtgtttattgaatggatggatgaatggatgtgtggaagaggctttcagaaacaattcccttcatagactaaggccaatgttacttttgcttagctctttagtttgaaataatttaaaatgtacagaaaagttacaagaataatacatggaacttgcacacaccctttacccagattcacaaatgtttaacattttgcaattttgtttttcattttcttttctttatatacacacttctgttacttattttctatttgaaaattagttgcagacatcacatccctttacctctcaatactttagtacacatttcctgtgaataaagatatcttttacataacagacacttcaaattgataaagcacatttccataatttacaactggtattccagttgtatcaaccaatgctgtcatttatagcattttcttctttgaagtacagggatctagtacaagtaactacttgtcctgcttctttcatttccttgaatctggaccttcatcagatggtaactttaagcacccaaaggtttttttctggtttctcctctgtgtagtttaagaccatgcaaacatcttgctactcatcaaaatgccccccatataacatccaaattaatctttatcatgatggtttatgactgtctcctcacattgggattggggcccaactgattattaacaatctacttttttggaagatataatatctcttcctgggaataagataatgggcataacatataataattcctaattgtatcatgacaatcacaatccaaaatactaaatctgtgatgtgtctaaatctcttttccccattgtttttgcaggcatcaatggctatgtttttgatagtttgcagttgtcagtttgtttgcatgaggtggcatactggtacattctaagcattggagcacagactgacttcctttctgtcttcttctctggatataccttcaaacacaaaatggtctatgaagacacactcaccctattcccattctcaggagaaactgtcttcatgtcgatggaaaacccaggttagttattatatttttcttgtaccaacagctgtgaatgcttcactagccattcgtatgctcttttgcccactagctcacatgctgtcatttatagcattttcttccttgaggtacagggatctagtttctcctctgagtagttattattttcacccttgcaactaataaacagtttgaaggatcacgtagtagttctatttttagttttttgaggaacctccttactcttttccacagtatttgtacttatttacactcccaccaacagtgtacaagcattccccttttgccacatcctcaccagcattttttaattattttgtctttttgataaaagccatttaactggagtgaaatatctcattgtgcttttggtttgcatttctctggtaattagtgatgttgagcagtttttcatatacttgttggccatttgtatgtcttctttttttttttttttttttttttttcagacggagtctcgctctgtagcccaggctggagtgcggtggcacgatctcggctcactgcaagctccgccacccgggttcacgccattctcctgcctcagcctcccgagtagctgggactacaggtgcccgccaccacacccagctaattttttgtatttttagtagagacagggtttcaccgtgttagccaggatggtctcgatttcctgacctcgtgatccacccgcctcggcctcccaaagtgctgggattacaggcgtgagccaccgtgcccagcctgaatgtcttcttttgagaaatgtctattcagatctttgtccatttttaatagggttctttgttttttttgctattgactagagtttcttatatattctggttattaatgccctctcagttgtatagtttgcaaatatttcatcccatcctataaattgtctcttcactttgttaattgtttcctttgctgtccagaagctttatggcttgatataatcccatttgtctacttttgctttagtcccctgtgcttttgaggtcttacctgcaaaatctttcccagaccaatgtcctggcgcattcccccaatgttttcttccagtagtttcatactttcaggttgtatattttagtctctaatccattttgatttgatttttgtatatagtgagagataggggtatagtttcattcttctgcatgtggatatccagttttcccacaccatttattgaagagactattctttcaccagtgcgtgttcttggcactttgtcaaaggtgagttggctataaatgtgtggatttatttctgggttttctgtcgtgttccactggcatatatttctggttttatgccagtaccgtgctgtttttgttactacagctttgtagtatagtttcaagtcaagtagtgtcatgcctccagctttgttcattttgctccagattatttagctgtttggagtcttttgtggttccacacaaattttaagattcttttttctatttctgtgaaaaacttcactggcatttggataggtattacattaaatctggtagcattgatattttaacaatattagtttttccagcccattaaaatgggatagataccttttcagttttttgtgtgttcttcaattccctttatcagtattttagttttcattatagagatatctcagctctttggtttaatttattccaatatatttatttttattatagctattgtaaatgatttttaaaaaatttctttttaggttgttagctcttggtatatagaaatgctactgatttttgcatgttggttttgtatcctgcaactttactgaatttgtttatcagttctaatagttttttgatggagtctttagttttttgtgaaatataagattatgtcatctataaacaaggagaatttgacttcttcctttccaatttgggtaccctttatttctttctcttgcttacttgttctggcttggacttccaggactacattttatagaattggtgaaagtgggcatccttatcttgtttcagatcttaaaggaaaggcttttggttttccacatttggtatgatattagccgtagtttgtcatatatggcatttattgttttgaggtaagctttctatacccagtttgtttagagttttctcatgaagggatgttgaatttaatctttttggcatcaattgaaatgatcatttgtttttgtccttcattctgttgatatgatgtatcacattgattcatttccatatgttgaaccatccttgcatccctgggatgaatcccccttgatcatgatgaatgatcttttactgtgttgttgaatttggtttgctagtagttcgttgaggatttttgcatcaatgttcatcagagatattggcctgtagtttctttttgtgtatgtgtgtgtctttgtctggtttggtttcagggtaatactggccttgtggaatcagtttggaagtatttttcccccttgatttttgggatagtttgtgaagagctggtattagttctttttttttattattatacattaagttttagggtacatgtgcacaatgtgcaggttagttacatatgtatacatgtgccatgctggtgtgctgtacccattaactcgtcatttagcattaggtatatcgcctaatgctatccctctccccttcccccaccccacaacagtccccagagtgtgatgttccccttcctgtgtccatgtgttctcattgttcaattcccacctatgagtgagaatatgcagtgtttggttttttgttcttgcgatcgtttactgagaatgatgatttccaatttcatccatgtccctacaaaggacatgaactcatcatttttatggcggcatagtattccatggtgtatatgtgccacattttcttactccagtctatcattgttggacatttgggttggttccaagtctttgctattgtgaatactgccgctataaacatacgtgtgcatgtgtctctatagcagcatgatttatagtcctttgggtatatacccagtaatgggatggctgggtcaaatggtatttctagttctagatccctgaggaatcgccacactgacttccacaatggttgaactagtttacagtcccaccaacattgtaaaagtgttcctatttctccacatcctctccagcacctgttgtttcctgactttttaatgatcgccattctaactggtgtgagatggtatctcactgtggttttgatttgcatttctctgatggccagtgatggtgagcattttttcatgtgttttttggctgcataaatgtcttcttttgtgaagtgtctgttcatgtccttcgcccactttttgatggggttgtttgtttttttcttgtaaatttgtttgagttcattgtagattctggatattagccctttgtcagatgagtaggttgcgaaaattttctcccattttgtaggttgcctgttcactctgatggtagtttcttttgctgtgcagaagctctttagtttaattagttcccatttgtcaattttggcttttgttgccattgcttttggtgttttagacatgaagtccttgcacatgcctatgtcctgaatggtattgcctaggttttcttctagggtttttatggttttaggtctaacgtttaagtctttaatccatcttgaattaattttagtataaggtgtaaggaagggttccagtttcagctttctacatatggctagccagttttcccagcaccatttattaaatagggaatcctttccccactgcttatttttctcaggcttgtcaaagatcaggtagttgtagatgcgtggcgttatttctgagggctctgttctgttccattggtctatatctctgttttggtaccagtaccatgctgttttggttactgtagccttgtagcatagtttgaagtcagggagcgtgatgcctccagctttgttcattaggcttaggattgacttggcgatgcgggctcttttttggtttcatatgaactttaaagtagttttttccaattctgtgaagaaagtcattggtagcttgatggggatggcattgaatctataaattacattgggcagtatggccattttcatgatattgattcttcctacccatgagcatggaatagtcttccatttgtttgtatcctcttttatttccttgagcagtggtttgtagttctccttgaagaggtccttcacatccgttgtaagttgtattcctaggtattttattctctttgaagcaattgtgaatgggagttcgcttatgatttggctctctgtttgcctgttattggtgtataagaatgcttgtgatttttgtacattgattttgtatcctgaggctttgctgaagttgcttatcagcttaaggagattttgggctgagacaatggggttttctagatatacaatcctgacatctgcaaacagggacaatttgacttcctcttttcctaattgaatacactttatttccttctcctgcctaattgccctggccagaacttccaacactatgttgaataggaaaggtgagagaaggcatccctgtcttgtgccagttttcaaagggaatgcttccagtttttgcccattcagtatgatattggctgtgggtttgccatagatagctcttattattttgagatacgtcccatcaataccaaatttattgagagtttttagcatgaagggttgttgaattttgtcaaaggccttttctgcatctattgagataatcatgtggtttttgtctttggttctgtttatatgctggattacatttattgatttgcatatattgaaccagccttgcatcccagggatgaagcccacttgatcatggtggataagctttttgatgtgctgctggattcggtttgccagtattttattgaggatttttgcatcaatgttcatcaaggatattggtctaaaattctcttttttggttttgtctctgcccggctttggtatcaggatgatgctggcctcataaaatgagttcaggaggattccctctttttctattgattggaatagtttcagaaggaatggtaccaattcctccttctacctctggtagaatttggctgtgaatccatctggtcctggactcttttcggttggtaagctattgattattgccacaatttcagagcctgttattggtctattcagagattcaacttcttcctggtttagtcttgggagggtgtatgtgtcgaggaatttatccatttcttctagattttctagtttatttgcgtagaggtgtttgtagtattctctgatggtagtttgtatttctgtgggattggtggtgatatcccctttatcattttttattgcatctatttgattcttctctcttttcttctttattagtcttgctagcggtctatcaattctgttgatcctttcaaaaaaccagctcctggattcattaattttttgaagggttttttgtgtctctatttccttcagttctgctctgattttagttatttcttgccttctgctagcttttgaatgtgtttgctcttgcttttctagttcttttaattgtgatgttagggtgtcaattttggatctttcctgctttctcttgtgggcatttagtgctataaatttccatctacacactgctttgaatgtgtcccagagattctggtatgttgtgtctttgttctcattggtttcaaagaacatctttatttctgccttcatttcgttatgtacccagtagtcattcaggagcaggttgttcagtttccatgtagttgagcggttttgagtgagtttcttaatcctgagttctagtttgattgcactgtggtctgagagacagtttgttataatttctgttgttttacatttgctgaggagagctttacttccaactatgtggtcaattttggaataggtgtggtgtggtgctgaaaaaaatgtatattctgttgatttggggtggagagttctgtggatgtctattaggtccgcttggtgcagagctgagttcaattcctgagtatccttgttaactttctgtctcgttgatctgtctaatgttgacagtggggtgttaaagtctcccattattattgtgtgggagtctaagtctctttgtaggtcactcaggacttgctttatgaaactgggtgctcctgtattgggtgcatatatatttaggatagttagctcttcttgttgaattgatccctttaccattatgtaatggccttctttgtctcttttgatctttgttggtttaaagtctgttctatcagagactaggattgcaacccctgcctttttttgttttccacttgcttggtagatcttcctccatccttttattttgaggctatgtgtgtttctgcacgtgagatgggtttcctgaatacagcacactgatgggtcttgactctttatccaatttgccagtctgtgtcttttaattggagcatttagtccatttacatttaaagttaatattgttatgtgtgaatttgatcttgtcattttgatgttagctggttattttgctcgttagttgattcagtttcttcctagcattgatggtctttacaatttggcatgattttgcagtggctggtactggttgctcctttccatgtttagtgcttccttcagaagctctcttaggtcaggcctggtggtgacaaaatctctcagcatttgcttgtctgtaaaggattttatttctccttcacttatgaagcttagtttggctggatatgaaattctgggttgaaaattcttttctttaagaatgttgaatgttggcccccactctcttctggcttgtagagtttctgccgaaagatcagctgttagtctgatgggcttccctttgtgggtaacccgacctttctgtctggctgtccttaacattttttccttcatttcaactttggtgaatctgacaattatatgtcttggagttgctcttctcaaggagtatctttgtggcattctctgtatttcctgaatttgaatgttggcctgccttgctagatttggcaagttctcttggataataccctgcagagtgttttccaacttggttccattctccccatcactttcaggtacaccaatcagttgtagatttggtcttttcacatagtcccgtatttcttggaggcttcgtttgtttctttttattcttttttctctaaacttatcttcacacttcattttattcatttcatcttccattgctgataccctttcttccagttgatcgcattggttactgaggcttgtgcattcatcacatagttctcgtgccgtggttttcagctccatcaggtcctttaaccacttctctgcattggttattctagttgtccattcgtctaattttttttcaaagtttataacttctttgccattggttcgaacttcttcctttagctcggagtagtttgatcttctgaagccttcctctctcaactcatcaaagtcattctccatccagctttgttccattgctggtgaggagctgcattcctttggaggaggggaggtgctctgattcttagagtttttggtttttctgctctgttttttccccatctttgtggttttatctacctttggtctttgatgatggtgacgtacagatgggttttcggtgtggatgtcctttctgtttgttagttttccttctaacagtcaggaccctcagctgcaggtctgttggagtttgctggaggtccactccagaccctgtttgcctgggtatcagcagcagaggctgcagaacagcagatattggtgaactgcaaatgctgctgcctgatcattcctctggaagttttgtctcagaggagtagctggccatgtgaggtgtcagtctgcccctactggggggtgcctcccagttaggctactcaggattcagggacccacttgaggaggcagtctgcccgttctcagatctcaagctgcgtgctgggagaaccactactctcttcaaagctgtcagacagggacatttaagtctgcagaggttattgctgtcttttgtttgtctgtgccctgcccgcagaggtggagcctacagaggcaggcaggcctccttgagctgtggggggctccacccagttcgagcttcccggccgctttgtttacctactcaagcctgagcaatggcgggcacccatcccccagccttgctgccaccttgcagtttgatctcagactgctgtgctagcaatgagcaaggctccatgggcgtaggaccctctgagccaggtgcaggatataatctcctggtgtgccgtttgttaagcccgttggaagagcgcagtattagggtgggagtgacccgattttccaggtgccatctgtcacccctttctttgactaggaaagggaattccctgaccccttgtgcttcctgggtgaggcgatgcctcgccctgcttcggctcacgcacagtgcactgcacccactgtcctgcacccactgtccggcactccccagtaagatgaacccggtacctcagttggaaatgcagaaatcacccgtcttctgcatcacttatgctgggagctgtagactggagctgttcctattcggccatcttggctcccaatgcaaagaccttcaaacaacgtgacttcattttctcactcctaccttttgtgctcttgtcatttatttgaattctacatatattttaaaccccataagacattattattgttttatataatcaatatcatttatatatatatatatatttacacctttcatttctttcattcttttctgcatttcttgcttccatctatgatcattttctttttgtctgaagaaacttctttggaacttccttcagtgtgtgttggctagtaaaaagttctctgtcagtttttggtcagaatgggtctttattttgcctagatacaagtccttggttggatttacatattgtgaatgttttctcccagtctgtggtttgtcttttcactcctttaagggtgcattatggttaatagaagttcttacatttaattaattcttatttttcagttttttatggttaatgccttttgtattctgtttcagaaatttttgcctatcctaagaacatgatgccatccttctatattttctttctacatattttaaatattttcttctagaagtctgattgctgtgttgttcacaattaagtttatgattcatttttaattaattttgatggagtgatgcagataaaagttcatttttccatatggatatttaattgctctagcaccaattgttggaaaaaaataatttcctcactgaattgcactgttgtctttgccatgaatctgatgactgtatcactgtagctttgtttctgtactctatttcaggggtaggttatgatccacaagccaaatttgcagcttgtttttatatggcattgagctaagaatttttttacatttttaaagaattgtcacacaaaacaaaaaaaaagcaaaaaaacaaataaggatatgtatcatggaccatatgtgtctacaaacctaaaatatttactatgttgctttttacagaaaaagtttgccaacccctgatctcttatattccattgacttattggtctatctttgtaccagtaacatactatcttatagtaagttttaatatttgttagtataattcctccaactttgctctctttgatttttatataaattttagaatcatcttgtcaattttatcaataaaaatatcttctgaggttttgatagggattacattgattctgcagatcaatttgggggagcatacctcttgacaatattgagtattcctgtccatgagcatggtttagttatttatttacatcttttaaattttctcttggcaatgtttttgtaaaattttagtgtacaggtcttgcacatttttgtaaagtgtattctttggtatttaatgctattataatattttttatggtatcagtttttgtcaattgtgtttttctagaaatatgtccctttcatctaagttgtttaatttacttgaagtaagttatttgtaatgttcttttatcatccttataatgtctgtactgatgtctccgttttcatacctgatattgttatttatattttatctattttaagtttatcgcctgcacccactaactcgtcatctagcattaggtatatctcccaatgatatccctcgcccctccccctagtgcacatgtaccctaaaacttaaagtataataaaaaaaaaaagtttgtcgcctttgttataggttcatcaaatttactaatcctaccataggatcaaatttttgctttgttcatcaggtcatggaattaaaaaaatttttttgttttgtttattttctatgttgaatttttatttttattttgctttgcatttcatttatttctggtcttttgttattattccaatactttctctggattcagttttctttttcttcttgacttcttgagattaaaacttggttcattgattttcaacatttcttactttttaaaagttcatacaaagcataaatttccctttatatactgctttaaccccatatcacaaattttgatgagtcatatttttattatcattgagtttaaaatattttataaattttacgttatttcttgttttattcatagttattttacagtgttttacttaatttcccaatatatggcgattttctggctctctctctgttgctgatttatttgttttactgtgatcacataacatactctatattatttcaatcatttgaaatttgttgagacttgctatatgcccagtgaataatttaatttgattaatggcccactgcatttgaaacaaatatgtctttgctgttattgggtagagtgtcatatatttgcctattatgtcaagttgctttatcatgtttttaaaatccttataaacttcctgatattttatctgtttcttacagacatggaggaaactgtgacatctctgtgattgttgagtttgttattttgatttttgtatttgttagtaagaatgtttcaaaataaatgaggcaatataaaatcaggtgcttacaactttaaggttgtattcttattaaatcaattctttcatctttgtgaaatgtcctttttgtctgaagtagtacttgttgccttaaacgtctgcattgtctaaaatttatacacctgcactatcatatttattttgcttaatgtttgtgtggtatatatttcccattcttttcttttcaacctatctctatccttatatttacagtgtgtcttttttaacattttctgtagtgcaagtctgttggttaattaattttgtcagtttttgcttctctgaaaagtctttatttctgtttttgaattatatcttcactgtgtatagaattctgggtttgtggttgttgtttttgttttattacattttgttttattggtttttccctcagcactttaaaaatgccgctccattgtttctacttgcatagtttttcacaataagtttgttgtaattcccatttgcattcaactgtacataatgtatctttttaaaaaaatctggatggcttcaagctctttactttgatttttgtgtgtgtgtgtgtgtgtgtgtgtgtgtgtgtgtgtgtgtgttactttggcattctctaggcttattcaatctgtaatttggtatcattaattttgaaaaatatttatcatctgtgtcttcaaatattgcttctaattctttctcttcttctggtattgcatttacatatattatactgttcaattttgtcacacagctcttgaatatgctgttctagtttgttttctaactatttttccttctagttgttcagttttgttgacatttattgacctatttttacttcagtaattgtttcctgggttgttgagttaattgatgaactcatagatgacatacaatttatctttttattcttgtgtcacttgtgcttttgatgtcacatctaggaaggctttgtctagcccaaggccacatttacttccatattttcttctaagagtttgatagttgtagctgttacatatatgtctatgatctagtttgaataaatttttgtgtatggtgtgaagaagaggtctaacctcttttttattttttgcatgtaaacatccagttgtcccggcaccatttgttgaaaatatgattcttttcccattaagtcatcttgacacccttgttgaaaatcaattgaccataaatgtgagagtttatttctgaactctccattctgttccattgacccatacgtcttctataaattcttatagctaattctacattagactttggtttttcagatgtggtcatctcattagattatggtgatatgtttggttacaagttttatcttctccttggcaacattttttttattactgctcttcttttattcgtttttgttgttcctttctctttttgtgagacagggtctcactctgttgcccagggtggagtaagtggtgtgatcatggctcactgcagcctcaacctcctgggctcaagcaatcctcccacctcagcctcccaagtagtgggactacaggcatgcaccatcatgccaggctaacttttttattttttgtagagacagggtcttgctttgttgcccaggctggtcttgaactccaagctcaagcaatcctccaacctcagcttcccaaagtgctgggattaccagtatgagccactgcacctggccttgttgttcctttcttccttttatcttgtagtatcttgatcctttttgcttattatttatcattgaggtgagtttgttctaaataaacttttcgcagaaagtttatgtagatatattaatatcaatgaggcattaggagtgagttttagattagcaggaattctcttatgaaaggtattgattgtatgtgtgagttttcagcctttacttctctccagcccatcaagatcaaagctgcagagttgtttacatttcagaatttctttcctcccctccccaccttgcaaaacagacttacagtgcaaaaatgacttgtcaatgtgattctttcttctggtcccatctttcctaccttttgagacttgtgttgaaaggagtccagtaaaaccaccgatgctagcttgtataccctgatcccattgttataatgaatgactgactgtttttcatatcaaagtataatacttgcaccttgatagaagaaagaaacaaggccaggcacagtggttcatgcctgtaatcccagcactttgggaggctgaagtaggaggaataattagactttgatattaaaaatggggaagatatggcggtataagatatgaggaagtatgtcttcttggacttttctgaaatctgccagccatgagcatccactctttttatcttttgatacctgttttatattaactatacttctattttgtggtttcatggcttcagatatcttccagcttaattgtactctgtctttaattatttgcagcaatttctgaaaggagcaagaagaaaggccagccctttcttcactaccttaaaaactggtcatcttttgaaaccccatgaaaggcacagtgggtgaccatctacatcaggagtgggcaaactatggcccttgggtagtctggtctctgtccgtttttgtaaggttttattggaacccatacacacacaaactgatcatctcttgttatgtgttaagttttcttataattattcttttctatttcatccagctgaattaccatttcaccttgtgtatgccctttccagtcttaaattatagaagctatgtctttgtggttttaaattatggaagctgtgccttcttgtgttttagtatggcaagatatttgttcttacttttcctctagaatctgcagtggattactttcagaagtaggtattgcctctaagtttcctgacttctgtttccttctccctgttctgtagtatatttatagattgcatgttttctcgtccttaaacaaggtacaaatatgttctgatcaaggtttgctagccgagaggataagtggcttgctcttagcctaactctctgtctacttaatggatgtcgaattcccttctcaactcaacagctagtaactagttccaagatcggataatagcttacagaattaattagttcagtgaaagccctggtttgatcacagaggcaggagactgatctatatatttgtagtgctgactagaccccaacttggccagatagcttatacctatgtcagaagttggaggaggagattgacagctgaggtgtctccaagggaattacaattattttcattttctttgtgtctgtaattatgtctcttttcttacttcaaattttgtatatgtgaaatttcttaatttttatttggttatttattttattgactttttcatcaaacaaccaactctaagttcttggattgaaatttatgaattaattataatgttttaaatttaccattagtcacacatacaatacaaaaagatattttcattacaaaattttaacccaagccattaaaactaaactccagcttggtcaccattcctaataccaggcccctctcagaggggagggtaaataaaagtccattttggtaactagtttgacgagaatctctaattgtttccctgtttttcttataatgtctgcctttgaattatcctctttttttcaagagttccatcatataatgtattcctttttgcttacagattgacctcctagaggcatgcatccccctgctccagtctgagctggttctctctaggcctgaggctcagttatcaacttgggacttttatttaccctccctcaggataggtacctggttcttggataccaggtcttactcttgtttgagatactcctttattttggtggcaaacattccataatcacttcctgataatggtgacatttgaggtagattttctgagtctttatatgttagaatatgtttttattctcctttgccacttgattgataatttggctgcacatagaatgtaagcattcacagggcttttgggagcagcttcccttgagaagaaggtggatgcagttaagatcttccctgaaaagactgtgtgaaatgacaaggctattgaggtacccaacgggtagcttggtaaaggtgtatcttgtctcttatgtttatgcatctactttaccaccatgtaattagcctattataacttgttgcattccttcactcagctaatcttgttcatggtagaaattaatattgctagtaccatggtagaattttatattagctggatcctagacctaaatgctccttccttgtgcttacatattctgcaagtgggtgacagtggatgctaggtattgtgttatgtgatttcaatgtattatatgatggggtagatactattagcctcatttgaaaattagaaacctattgttcagaaagtttaagtgactttctcaaagtcacacagctggtaaatggtagaactgggatttgaatccaggcaatctgatggatttaagaggaacctgtgccactatgtgatatagcaataacatctagccaatataaatactttcctgaattaaatcactgtcatattcagagagttctgtgtcactattaagaccctccattattgtgtatattaattacatttccctattttaatcccaatatctattcatttttatcacagtcctttcttatggtcacaaacaggcatagtacaacagcagcaatgcaaaaaccacttttatattacatgttccagggatttaacccaatgacctgtgatataatgatactgactagtattttttcatttatctgggaatgggagagaacctctaacagaacgttttagaatctgtgttatgagtaaccagagtcttattcttcctcatctccaggtctatggattctggggtgccacaactcagactttcggaacagaggcatgaccgccttactgaaggtttctagttgtgacaagaacactggtgattattacgaggacagttatgaagatatttcagcatacttgctgagtaaaaacaatgccattgaaccaagaagcttctcccagaattcaagacaccctagcactaggcaaaagcaatttaatgccaccacaattccagaaaatgacatagagaagactgacccttggtttgcacacagaacacctatgcctaaaatacaaaatgtctcctctagtgatttgttgatgctcttgcgacagagtcctactccacatgggctatccttatctgatctccaagaagccaaatatgagactttttctgatgatccatcacctggagcaatagacagtaataacagcctgtctgaaatgacacacttcaggccacagctccatcacagtggggacatggtatttacccctgagtcaggcctccaattaagattaaatgagaaactggggacaactgcagcaacagagttgaagaaacttgatttcaaagtttctagtacatcaaataatctgatttcaacaattccatcagacaatttggcagcaggtactgataatacaagttccttaggacccccaagtatgccagttcattatgatagtcaattagataccactctatttggcaaaaagtcatctccccttactgagtctggtggacctctgagcttgagtgaagaaaataatgattcaaagttgttagaatcaggtttaatgaatagccaagaaagttcatggggaaaaaatgtatcgtcaacagagagtggtaggttatttaaagggaaaagagctcatggacctgctttgttgactaaagataatgccttattcaaagttagcatctctttgttaaagacaaacaaaacttccaataattcagcaactaatagaaagactcacattgatggcccatcattattaattgagaatagtccatcagtctggcaaaatatattagaaagtgacactgagtttaaaaaagtgacacctttgattcatgacagaatgcttatggacaaaaatgctacagctttgaggctaaatcatatgtcaaataaaactacttcatcaaaaaacatggaaatggtccaacagaaaaaagagggccccattccaccagatgcacaaaatccagatatgtcgttctttaagatgctattcttgccagaatcagcaaggtggatacaaaggactcatggaaagaactctctgaactctgggcaaggccccagtccaaagcaattagtatccttaggaccagaaaaatctgtggaaggtcagaatttcttgtctgagaaaaacaaagtggtagtaggaaagggtgaatttacaaaggacgtaggactcaaagagatggtttttccaagcagcagaaacctatttcttactaacttggataatttacatgaaaataatacacacaatcaagaaaaaaaaattcaggaagaaatagaaaagaaggaaacattaatccaagagaatgtagttttgcctcagatacatacagtgactggcactaagaatttcatgaagaaccttttcttactgagcactaggcaaaatgtagaaggttcatatgagggggcatatgctccagtacttcaagattttaggtcattaaatgattcaacaaatagaacaaagaaacacacagctcatttctcaaaaaaaggggaggaagaaaacttggaaggcttgggaaatcaaaccaagcaaattgtagagaaatatgcatgcaccacaaggatatctcctaatacaagccagcagaattttgtcacgcaacgtagtaagagagctttgaaacaattcagactcccactagaagaaacagaacttgaaaaaaggataattgtggatgacacctcaacccagtggtccaaaaacatgaaacatttgaccccgagcaccctcacacagatagactacaatgagaaggagaaaggggccattactcagtctcccttatcagattgccttacgaggagtcatagcatccctcaagcaaatagatctccattacccattgcaaaggtatcatcatttccatctattagacctatatatctgaccagggtcctattccaagacaactcttctcatcttccagcagcatcttatagaaagaaagattctggggtccaagaaagcagtcatttcttacaaggagccaaaaaaaataacctttctttagccattctaaccttggagatgactggtgatcaaagagaggttggctccctggggacaagtgccacaaattcagtcacatacaagaaagttgagaacactgttctcccgaaaccagacttgcccaaaacatctggcaaagttgaattgcttccaaaagttcacatttatcagaaggacctattccctacggaaactagcaatgggtctcctggccatctggatctcgtggaagggagccttcttcagggaacagagggagcgattaagtggaatgaagcaaacagacctggaaaagttccctttctgagagtagcaacagaaagctctgcaaagactccctccaagctattggatcctcttgcttgggataaccactatggtactcagataccaaaagaagagtggaaatcccaagagaagtcaccagaaaaaacagcttttaagaaaaaggataccattttgtccctgaacgcttgtgaaagcaatcatgcaatagcagcaataaatgagggacaaaataagcccgaaatagaagtcacctgggcaaagcaaggtaggactgaaaggctgtgctctcaaaacccaccagtcttgaaacgccatcaacgggaaataactcgtactactcttcagtcagatcaagaggaaattgactatgatgataccatatcagttgaaatgaagaaggaagattttgacatttatgatgaggatgaaaatcagagcccccgcagctttcaaaagaaaacacgacactattttattgctgcagtggagaggctctgggattatgggatgagtagctccccacatgttctaagaaacaggtatgaatgcattggttattcctttgctctgctcttgtgacatttgactttaccagatgatgacaccaacaatgagagttagaggatgaaaaatcaaggtgtcttgaaactcttactctggtgagatagagagaagagaggtttacaagagggtagaggaatcagggacaagaaggagcaatggggagcaggaagaaagtcaacctcacctatcaaccttatgagctgcaggggaaatcttagtctcatcagagaactttaagcaaggcagaaggaagaagcaagttcgtgttaaagaggttaaggacttggggaggattggttttcatgatactggggatccagagggcaaagtaggatgattttatttttaggtgagtagagggaggttgagcagtcaagtagtacagagaaatgtggaatataaacataaggagagtcagtcagtcacaaatatttatggaacacctactacatgccagacacttttgtacacattggagtgcagcacagcaggagcttatattctattggaaagagcaagagacaagttagtacaaaactaaataaggcaatctcaattgtgttgttcagaagatagaatagaataatatggtagagagaataatatgatagagtaatacggtagagtgttacattagctgtggtggtcatagaaatcatctttgaggagttgagacctaaatgatgataacaggccagctgatggagctctgagagaagatgtttccagacagagggaagagaaaatgcaaaggccctgagaatggaaaaagtttaccatgtttgaggaacaagaagggacaagcatgacttgtcactttcccaccttgctttctagctcaagtaagcccttattgctgcattgcaaccatagactatttccctagtccactgactttctcattctcctggacctctatcttagattttctgtgttttccttaaatctcgagcaccttttttccattctccaatgcccattttcactcttagctgatgctgtgcaatgaacctccacagactcccaacatcacatttactggcatttgtacccatatactctgcctgcacacttattacaataaatagagtgtctgtgctcctaaggccaacctctccagttttgtacttgattcccatctcttctcccttcataaaaaatgttgctccagcaatttctccttttctcccttacatcatcaatttatctctccactagattaatctcatcaacatcaatcatgctattatttcctcccctatctttacagaaaccgtcttaaaataattgtccctgcttgcagcctttgcatcttttcctgccattctctcctctttaacccactccaaagaagcttttatctctattatttcataagaactacattttcaaggtcattattgatctttacattactgattactagccctcatcttatttgaattctcagtagtatttgagaggtgattactccatcgttgatacaggttctcacttggtttctctaacaccacttttcttcacttttctactaaacttactgccaatctttgtcaactttgcgagtccttcttcatccccctaatctttaaaggttagagtgctccagggattagttctccaacttcttctttattctatttatactcactctgtgacgacattgtttagcctcatgattttaagtactatctatctgcagataattccagttgaatatctggagatattctcagatctctctcctgaagtcaaaatttacatatcaactccctaccttaacatgcacacaattagactcttaattcctgccccttcccaaaacctgctgattgctcagccttctccatggcaatcaaaaaccattcctggccgggcatggtggctcactcctgtaaccccagcacttggggaagctgaggcaggtggattggttgagccccagagttcaagatcagcctgggcaacatggcaaaacctcatctctattaaaaatacaaaaattagccaggcgtggtggtgcacacctgcagtcccagctactcaggaggctgaggcacgagaatcgcttgaactggggagacggaggttgcagtgagctgagatggcctcactgcactccagcctgggcaacagagtcagacttgatctcaaaaaaataaataagtaaaaccattccctatttcagttattcagtcacagatcttgaagttttccaactctttttttcttacattaacatctaatctgtaaaggatcctgtattagtccattttcacactgctaataaagacatacctgagactgggcaatttacaaaagaaagaagtttaatggactcacagttccacatggctggggaggcctcacaatcatggcagaaggcagggaggagcaagttatatctcacatggatggcacaggcaaagagagagagcttgtgcagggaaactcctctttttaaaaccatcagatcttgtgagacttattcactatcatgagaacagcaagggaaggacctactgccatgattcagttacctcctatcaggtccctcccacagaacatgggaattcaagatgagatttgggtagggacacagccaaaccatatcattccaccccatcccctcccaaatctcgtgtcctcacatttcaaaaccaatcatgccttcccaacagtcccccaaagtcataacacatttcagcattaactcaaaagtccacagtccaatgtctcatctaagacaaggcaagtcccttccacctatgagcatgtaaagtcaaaagcaagttagttacttcctagatacaatggggtataggcattgggtaaatacagccattccaaatgggagaaattggccaaaacaaagggcctacaggccccatgcaagtctgaaattctacggggcagtcaaatcttaaatctctaaagtgatctcctttgactccatgtcttgcatctgagtcatgctgatgcaagaggtgggtgcccatggtcttgggcagctccacccctgtggctttgcagggtacagcctcccttgtgtctgccttcatgggctggcattttctgtagcttttccagatgctggtgcaagtttctgatggatctaccattccggggtctggaggacggtggccctcttctcacagctccactaggtggtaccccagtagggactctgtgtgggtgccctgagcccacatttcccttctgcactgccctagcagagtttctacatgaaggcccacccccgcagcaaacttctgcctgggcatccaggcacttccattaatttctaaacaacaaagcattcaagaggcgacttgggtgctattaagggcattcagtttcataagggaagcagagcataaaagtttggaaaatttgcagcctgataatgttagagaaaagcaaatcccattttctgaggagaaattcaagcaggctgcagaaatttgcataagtaatgaggagccgaatgttaatccccaagacaatggggaaaatgtctccagggcatgtcagaggtcttcacaccagcccctcccatcaccggcccagaggcctaagaggaaaaagttgtttcatgggctgggcccaggatccccatgctgtgtgcagcctagggagtcggtgccttgtgtcccagccgctacagccatggctgaaaggggtcaatgtagagctcaggctgtggcttcatagggtacaagtcccaagccttggcagcttccacatgatgttgagcctgcgagtgcacagaagtcaagaactggggtttgggaacttccgcctagatttcagaagatgtatgaaaacacctggatgcctaggcagaagtttgctgcgggggtgggccctcatggagaacctctgctagggcagtgcagaagggaaatgtgggctcagagcacacacacagagtccctgctggggtaccacctagtggagctgtgagaagaggaccaccgtcctccaggccccagaatggtagataccctaaatcatctctttcaaattcgaagttccacaaatctctaggacaggagcaaaatgccaccagtatctttgctaaaacataacaagagttacctttgctccagttcccaacaagttcctcatctctatctgagaccacctcagcctggatttcattgtccatatcattatcagccttttggtcaaagccattcaacaagtctctagagagttccaaactttccacattttcctgtcgtcttctgagccctccaaactgttccaacctctgcctgttacccagttccaaagtcgcttccacatttttgggtatcttttcagcagcaccccactctactggtaccaacttactgtattagtctgttctcacactgctgataaagatatacctgagactgggaaatttacaaaggaaagaggttttatggacttactgttccacatggctggggaggcctcaaaatcatggcagaaggcaaggaggagcaagtcttgtcttacatggatggcagcaggcaaagaaagaaagcttgtgcaggaaaactcttttttttcttttcttctttttagacagagtcttgctctgtcacgcaggctggagtcagtggcgtgatcttggctcactgcaacctccacctcccgggttcaagtgattctcctgcctcagccttccaagtagctggtactacaggcatgtgccaccacatgagatgagattttggtagggacacagccaaaccatatcattccccctgtcccctcccaaatctcatgtcctcacatttcaaaaccaatcatgccttcccaacagtcccccaaagtcataactcatttcagcattaactcaaaagtccacagtatttttagtagagatggggtttcaccatattggccagactggtctctaactcctgaccttatgatccgcccgccttggcctcccaaagcactgggattacaggtgtgagccaccatgcccagccaaaaactcttctttttaaaaccatcagttctcatgagacttattcactatcacaagaacagcataggaaagatctgcccccatgattcaattacctcccaccaggtccctcccacaacacatgggaattcacgatgagatttgggtggggatcctcttggctatcatttcaaaaaatagtcagggttgattatggacttagtattgaataagatgaaaatgtactgaaatggaacgatgaagataattgaccagggaaagcaggttacaagccaagagaggatacagtgtcacttcagatgctataaaagtgatgtttttattttttgaatgttatttggctatattttcaaattatctgcactgcatatgcactgcttctgtaataataaaagggtattaaaataataaaatcaagtctataaatcacacacacacaccccagcctcttctctacacctcagtgactaccaaccacatctaaattatcatcatttctcatctgaattattgcaagaagccattgcaataattcagatgagagttgatacaaagccttcctgtttccaaccttaccctcatatagtcttttcccaacattgcatctaaagtaatttttcaaattgcaattctgatcactgttctctgcttcagatcctccagtggattttcatctcactcagtaaattccaaagccttcaccatggccttcaagaccctacgaaatttgaccctctgcaacctctctgccttcatctgttaccattgtctcctgttaatcctgcctcagccacactgacctccttgttcttctcaaatggactagatgtgtgcctatctctagaccattacagtttctgttctctctacttaaaattatgtccctgatactctaatgcaagttctcttacttccttcaggacgctgctcaaatttcattttatcagtgaggctttccctgaacactgtatgtaaatattgctcccaccattttttttcaatgcacttaacagtgcctgaaatattatatatttatttctttattgtctatcttctctgactataagttaagctcattaagaacacaaactttggaggtattgttcaatgttgtgtccccagaactttgaacagtgcctggcacgtggcagatgttcaaataaatgtatgttgaatgaattagaaaatgataaatgtagggagacaaaagcaggtctcccatttatatccaaactctaggactctaggaaagactgattatatggaatcgtgtcacacagcatccatgggcaagagtggaggcagagataccagttaagatgctattgcagtcatacagataaaagaagacagttatttagaccagtgtggtggtgacagaaatggaaagaaatggaaggatgttgggtataattaaagataagcatataagactggctgttaattgagtatgggaagaatgaggagagaggatgtaaagaacatttctttttgtttgtttgttttgttttgtttttgtttctttttattatactttaagttctagggtacgtgtgcacaacctgcaggtttgttacatatgtatacatgtgccatgttggtgtgctgcgcccattaactcatcatttacattaggtatatctcctaatgctatccctccctcttccccccaccccccaacaggccccggtgtgtgatgttcccctacctgtgtccaagtgttctcattgttcaattcccacctatgagtgagaacatacagtgtttggttttttgtccttgcgatagtttgctgagaatgatggtttccagcttcatccatgtccctacaaaggacatgaactcatccttttttagggctgcatagtattccatggtgtatatgtgccacattttcttaatccagtctatcattgatggacatttgggttggttccaagtctttgctattgtgaatagtgccgcaataaatatacgtgtgcatgtgtctttatagcagcatgatttatagtcctttgggtatatacccagtaatgggatggctgggtcaaatggcatttctagttctagatccctgaggaattgccacactgacttccacaatggttgaactagtttacagtcccaccaacagtgtaaaagtgttcctatttctccacatcctctccagcacgtgttgtttcctgactttttaatgatcgccattctaactggtgtgagatggtatctcactgtggttttgatttgcatttctctgatggccagtgatgatgagcatattttcatgtgtcttttggctgcataaatgtcttcttttgagaagtgtctgttcatatcctttgtataagattattagtggatttctcagaagaaatattgtagaccagaagggagtgaaaatatagatttaaaatcctgaaaggaaataaaaactagcaatgaaaaatactatatccagtaattttatctttcagaaatgaaggggtgataaagattttctcagaaagacaaaagctagatctgctttataagaaatgctagtaggagttcttcaagctgaagaaagaggatgcttattagtaatatgaaaacatatgaaaggataaaactcactagtaaaaataagtacattgtcaaatccaaaacactctagtagtgtaatggcagtgggtaaattaattatatctttagtataaaagataaaagacaaagaaagctattttaaaaactaaagctataataatgtgttaaggaatgcaaattattaaaatatgtaaactgtcacatcaaaaacataaaataggctgggcacagtggctcatggctgtaatcccaacactttgtgggggccaaggtgggaggatcacttgagcccaggcatttgagactaacttgggcaggatagtgagatctcatctctataaaaaatttaaaaattagtaaagcatggtggtgcatgcctgtagtcccagctactcaggaggtggaggtgggaggactgcttgagcctgggggggtcaaggctacagtaagcaatgatcacaccactacactccagcctgggcaacagagcaagaccctgtctcaaaaaaaataataatatgtaggaggaagggaataaaagtgtagagtttgtggatgcaataaaaattaagttgttatcagtttaaaatagcctgctaattttgtgtaagcctcatagtaaccacagagcaaaagcctatagtagatacacaaaacattttaaaaaggtccaaagcataccactacagaaagccatcaaactataaaggaagaatgcaacagaagaagaaaggatcaaaggatctaaaaaaaaaaaaagaaagaaagcaattaacaaaatgacacaagtatgaccaaagtccactgcttctttattactgatatagaatatctttcagatcttaagggactgattaattacttgggagagaaagtttgtgttgagaagatttgcttgtgttgcaatgagaaggggaagttctactcaacagaagctgtacaggcacatatgacaaaagctggtgtaagctttttacagatggtgatgctgctttggaatttgcagacttgtatgagtttaggagtagctacccagatcacaaggaaggggaggaccctaatgaggctgaggagtcgcccttaggaaaggacttagaatatgatgatgaaagcatggaactgattctgccttctgatgccagagtgggtcatcactccttgatgagatactacaaacagtgatttggcttgtcaagagctgtggtagttgctaaatattgtgaggccatgggccgagtgcttcagtaatagagagccctgggatagactggcaacacaggagcagctgttacatgaaagtgagacatgcattatatccaaaggatgaagtcaaaatggatgctgaagacagaaatgaagaacaatgccaccaagcagatgcactttagggtccaagtgagattctgagagtctgccaggattgagtgattgtctgctgcccaagtttcctccttgccctgaggaccagggaaagccagattgtatgatggacacttttgctgctacttcacttgctctaacataataataaaaatgaaaatctaaaaaatattttattgaagaatgaaggtgaaagaaatacattttcagacaagcataaacagagaaacttcaccattagcaaaagtccactaaaatattctaatgttatacttgagacaataaaaaagtgatacagaatggaaggcatgagagacaagatgggataaagagcaaacaaagttaaatatgtggataaatagagataagtatcataaaacatggtcaaatgttttatgagcgttaagatatatagaattgctttattcacagttggtttgctgtcataacacaagtatcatgaaaatcactgctaaatctaagccaaaattgggaaaggaaaaggttcatgtcactatcatcaacgttggacatgtagactcaggaaagttcaacactactggtcatctgatctataaatgtgatgtgatcaacaaaggaaccattgaaaaatttgagaaagaacctgctgagatgggaaagggctcatttgagtatgcttgggtcttggataactataaactgaacatgaatggaatatcaccattgatatctcctaaagaaacctgaggccaaaaatatcctgtgaccatcattgatgccccagcacacaggggctttattaaaaaaaaaaaaaaaaaaaaaaacatgattagagtgatatcaccaaaatggtggatagaagcaatctggcttcactctcctccagaaaaaccaaaaacaactattcagtgtctagcttatcaccaggaatatcccataactcaaaacagaggctgtgaggatctgagtggccacatagaagagaaaaactgcaagcagaagataacaaaaatgggcctgtttaactgcagcatccccttcccaagctgccaggcaccatgcagaaaagttcccccagactgacagtatgtacatcagaaaaagtgacatctagatgaagagccagctttcccaccatcttgggttcctttgcagaaaaatcattcctgcctcaatccgtgggaagcagcctgattgcctctagggtaaaaaaatcctgagggcagctagagacaaaggatggaggcggggctagcaaccccagcatgcaaaacacattggctgctcttcatctaagccaaagaagacaccaaatgagagagaatgttcagcccgtggttcctctggacacaaaatcctaaccagatgtctcacccaaccaggatatccagtttgggacctcccccaaatcgggaataggcagtaatccaagccgttgcaagagctgcagcaaatctgggcttacagcaccatctagtgccaaaaaagaggcagtaatctcagagtaaggaagctctaattcatacataacctttagacaggcatactcctgaaaaaccaaactaagccagacacaaagactggaataaataacttagcattcatacaaagacatagatatatgtgcataaaaaacaagagcaaatagggagctatgacctctccaaatggaaacagcatggagccagtgaccaaccctaatgagatggcaaattgtagctctcaaatcaataattcaaaataaaagttctgaggaaactcaaagaacacaaaaaagcaactgagaaatttatgagataaatttaacagagaaatcaaaataataatttaaaaaaccagaaatgctggagctgagaaatacaactgaacggaaaaaaaaaatgcactggaaagtctaaacagcggaactgatcaagcaaaacgaacaatcaatgagctcaaagacaggctatttgaaaatacacagtcaaaggacaaaaaataattaaaaggaatgaagaacacttgcaagatctagaggactgcctcagtagaacaaatctaagagtcatgggccttcaagagagaaagagcaatgaataaaaagctcaaagaaataacagaaaatatttccaaacctacagagagatgtaagtatccagttataggaaggctgaagatcaccaaacagattcaacccaaataagactaccccaaggcatacaataattaaactctcaaaggtcaaagacaaagaggggatcctaaaaagagcaagaaaaaagaagcaaataacatataaaggagctccagttcatccgggaatatactctggaccagatgaacctacctgacattttacagaacattttatccaactactacagaatatacattcttcttatcagcacatggaacattctccaggatagactatatattaggccagaaaacaagtctcaacatttaaaaaaataaaattatattaagtatcttttctgactacagtagaataaaactagaaatcaatgacaagaggaacgtttgaaactatacaaatacatggaaattaaacaacatgctcctgaacaaccaataagtcaatgaagaaattaagaaggaaatttattgaaacaaatgaaaatggaaacaacataccaaaatgaatgggatacaacaaaagcggtactaagagagaagtttatagctataaatgcctacatcaaaaaagaaagactcaaataaacctggtaatgatgtaactcaaggacatagaaaaacaagagcaaaccaaacccaaaattagtagaaggaaaataataataataatcatagaaataaataatattgagaaaaagaaaacaatatgaaagaccaatgaaatttttaaaatggctttttgaaagataaaatttaaaatctttagctagactaaggaaaaaaaatgagagaagacccaaataattgaaatcaaagatgaaaagagtcattaaaactgataacacaaaaatacaaagtttcactagaaactattatgatcaactatatgccaacaaactggaaaaactagaagaaatggataaatttctggacacatacaacttaccaagattgaactatgaggaaatagaaaacttgagcagaccaataactagtaatgagattgaagcagtagtaaaaagtctggcattaaataaaagtccaggacctgatgacttcactgctgaagaaaaacttacaccaattatactgaaactatttaatattgcaaaaaattgaagagaaaagaatgtttccaaactcattctacaagaccagcattatcccaatacccaaaccagacaaagacacaacaacagcaaaaagaaaactacaggccaacttcgctgatgaatatagatgcaaaaatcctcaacaaagtactagcaaactaaattcaacaacacattaaaatgagtatttgtcatgcccaagggggattcatcctaggaacacaaagatagttcaacatatggaaatcaataaatgtgatacaccacattaacagaaggaaagacaaaaaccatatatttatttcaataaatgtcaagaaagcattgaataaaattcaacatcccttcatgataaaaactctcaacaaatttggtttaaaggagcatacctcaaaacagtaaatgttatatatgacaagcccacagctaacattacaccaaatgggaaaaaattgaaagcctttcctctaagatctggaacaagacaagcatgcccactttcatcaattctattaaatgcagtcctggaagtccaagatggagcaattaagcaaagggccttcaaattagaaaaaaagaaatcaaattccccttgtttgtagacgatataatgttatatttagaaaaacctaaacactccaccaaaaaactgttagaactgatcaacaaattcagtagagttgcaagaagcaaaaccaacatacaaaaatcagtagcatttctatataccaagagctaacaatccgagagagaaatcataaaagcattttcattttcaatagctataataaaaataaatatctaggaacaaatttaaccaaagaggtgaaagatctctatactgacaactgtaaaaccctgatgaaaggaattgaagaagacacacaaaaaatgaaaaggtatctatcccatgttcatagaatggaagaattcatattgttaaaatatcaatactactagatttcatgtattacctatcaaaataccaataacatttttcacagaaatagaaaaagcagtcttaaaatttgtacagaaccacaaaagacccagatatggtttggctgtgtccccacccaaatctcatcttgaattgtagttcccataatccccacatgtcgtgggagggacccagtgggaagtgattgggtcatgggggcagttttcccccatgctgttctcgtgatagtgagtgagttctcatgaaatctgatggttttctaagtgtttggcatttcccctgctggcacttattcccactgccaccttgtgaagaagatgccttgcttcccctacgccttccaccatgattgcaagtttcctgagacctccccagcaatgcggaactgtgagtcaattatacctctttcctttatagattacccagtctccagcagttctttatagcagtatgagaacagactaatacagtaaattggtaccgaggtagggggggcactgctataaggatacctgaaaatgtggaagcaactttggaactgtgtaacaggcagaggatggaacagtttggagggctcagaagaagacaggaaaatgtggcaatgtttggaacttcctagagacctggagggctcagaagaagacaggaaaatctgggaaagtttggaacttcctagagaatcattgaatagctttcaccaaaatgctgatagtgatatggacaatgaagttcagactgaggtggtatcagatggagatgacgaacttgttaggaataggaataaaggtggctcttgctatgctttagcaaagagattggcagcattttgcccctgccctagagatctgtggaactttgaacttgagagagatgatttggggtatctggcagaagaaatttctaagcaacaaagcattccagagtgacagagcataaaagtttgaaaagtttgcagcctgatgatgcagtagaaaagacaaacccattttctggggagaaattcaacccagctacagaaatttatataattaacaaggagccaaatgttaatcaccaagataatggggaaaatgtgtccagggcatgttagagaccttcgcagcagcccctcccatcacaggcctggaggcctaggagggaaaaatgctttcgtggcctgggtccagggctcccctgcagtgttcagcctgggacttggtgccctgtgtcccagccactccagctataagaggccaaagtacagcttgggctatagcttcagagggtgcaagcccccagcctttgttctgtgggtgcacagaagacaaaaattgaggtttgggaatgtccacctagatttcagaggatgtatggaaatgcctggatgtccaggcggaggtgtgctgcagaggcagagccctcgtggagaacctctgctagggcagtgaggaaaagaaatgtggggtgggagcccccacacagtcaccactggggcactgcctagtggagctgtgagaagagggccactgtcctccagaccccagaatggtagatccactgagagcttgcaccgtgggcctggaaaagccacaggcactcaatgccagcccatgaaagcagccaggagcagggctgtaccctgcaaagctatgggggtggagcttcccaaggctgtgggagcctgccttttgtatcagggtgacctaaatgtgagacacggagtcaaaggagaacattttggaactttcaggtttaatgactgccctattggatttcagacttgcatggggcctgtagcccctttgttttggccaatttctcccatttggaatgagtgtatttacccaatgcctgtacccctattgtatctaggaaggaactaacttgcttttgattttacaggctcataaacagaagggattttccttgtctcagatgagactttggacttggacttttgggttaaggctggaatgagctaacactttgggggactgttggaaaggcatgattctgtttttaaatgtgaggacatgagatttgggaggggccatgggtggaaacatatggtttggctctgtgtccccacccaaatctcatcttgaattgtagtatattgtttgtaaaaattcctgcctatccagagattttttaaaaaaaaacaatactttcttcaattttctcttacaatttaattttttacatttaactttttaatacttcctgtagactaaaagttattttggtgcattgtgtgaaccaaagatcaaagtagttttatttttttctgaaaacatctattcattttttcaattaattgattgtttatattaaggatctaggaggatctaaaattatggaattgtgggcaagggcaatttttgccttacatttcatgtaaggcaaaataatccccatgtgtcatgggagggacccagtaggaagtgattggatcatgggggcaggttcccccatgctgttctcatgacagtgagtaagttttcatgagatctgatggttttataagcatctggcatttccccttctgtcacctctccctcctgccaccttgtgaaaaaggtgccttgcttccccttcaccttccaccatgattgtaagtttcctgaggcctctccagccatgtggaactgtaagtcaattaaacctctttcctttataaattatgcagtctcaggcagttctttataccagcaggaaaacagactaatacagaccctaaatatccaaagcagtcctgagcaaagagaacaaagctggaggcatgatgctactttatttcaaactatactacaaagctgtagtaaccaaaacagcatggtactggcataaagacagaaacatatgccagtggaacacaacagagaacccagaaatgaatccacacatttagagccaactcatttttgacaaagtgccaagaatatgcattggtgaaagaatagtctcttcaataaatgatgttgggaaaactggatatccacatgcagaagaattaaactaaacccctatctctcactgtatacaaaaattaaatcaaaatggattagagacttaaatatacaacctgaaagtatgaagctactggaagaaaacattggggaaatgctccaggacattggtctgggaaatattttatggcctgggaaatatcaaaagcacagacaactaaagcaaaagtagacaaacgggattatatcaagctataaagcttccgcacaacaaaggaatcaattaacaaagtgaagggacaacctacaggatgggatgaaatatttgcaaactatacaactgagagggtattaataaccagaatatataaggaactcaaacaagtcaatggcaaaaaagcaaaggatcctattaaaaatgaacaaagatctgaataaacatttctcaaaagaaaacatacaaatggccaacaggtatatgaaaaactgctcaacatcactaattaccagataaatgcaaaccaaaagcacaatggatatttcactccagttaaatgacttttatcaaaaagacaaaaaataatgaatgctgatgaggatgtggcaaaaggggaatgcttgtacactattggtgggagtgtgaattagtacagatactatggaaaagagtatgtatgttcctcaagaaactaaaaatagaacgaccatgtgatccagcaatcccactgctggatatatatccaaagacaggaaatcagtgtatcaaagagatagttgcacaccaacatttattacagcaccattcacaatagctaggatataaaatcaacctaagtatacatcaacagatgaatggataaagactgtgtggtatatatacacaatagactattactcagccattaaaaagaatgaaatcctgtcatttgtggcaacatcgatgagcctggatgtcactgtgttaagtgaaataagccaggcatagaaagacaaatatcacgttttcacttacatgtgagagcttaaaaagtggatctcacggagatagagagtagaatggtgcttaaaggagtttgggaatggtatgggggggtgggatggaatgaagagaggttgattaataggtgtaaaatgaaggggtggcctgcccctcgtcacccacagtgacgagaaacactgtgggtgtttctcgtcaggtgggacgagagactgagaaaagaaataagacacagagacaaagcacaggaaagaaaagtgggcccaggggaccggcgctcagcatacggaggacccgcgccggcactggtctctcagttccctcagtatttattgatcattatctctaccatctcggagagggggatgtggcagaacaatagggtaatagtggagagagggtcagcaggaaaacatgtgaacaaaggtctctgtgtcataaataagtttaaggaaatgtgctgtgccctgatgtgcacgtatacaaacatcttggtgcattaaagagcagtattgccactagcctgtctcacctccagccttaaggcggttttctcttttctcagtaaatagaacatacaatcgggttttacaccgagacactccattgcccagggacgagcaggagacagatgccttcctcttatctcaactgcaaagaggacttcctctttcactaatcctcctcagcacagaccctttacgggtgtcgggctgggggacggtcaggtctttcccttcccacgaggccatatctcaggctatcacatggggagaaaccttggacaatacctggctttccagggcagaggtccctgcggccttccgcagtgtattgtgtccctgggtacttgagattagagaatggtgatgactttttttattattattattatactttaagttctagggtacatgtgcacaacgtgcaggtttgttacacgtgtatacatgcaccatgttggtgtgctgcacccactaactcgtcatttacattaggtatatctcccaatgctatccctccccccaccccatgacaggccccggtgtgtgatgttccccctcctgtgtccaagtgttctcattgttcaattcccacctatgactaagaacatgcggtgtttggttttttgtccttgtgatagtttgctgagaatgatggtttccagattcatccatgtccctgcaaaggacatgaactcatccttttttatggctgcatagtattccatggacaagcatactgccttcaagcacttttttaacaaagcacatcctgcatagccctaaatccattaaaccttgactcaacaccgcacatgtctctgcgagcacagggttggggctagggttacagattaacagcatctcaaggcagaagaatttttcttagtacagaccaaaatggagtctcttatgtctacttctttctacatagacacagtaacagtctgatctctctttcttttccccacagtaaaattacacttaaatagaagggataagttgtagtgttcgatattacagtagggtgactatagttaacaatgatttattgtatgtttcaaaatagctagaagagaagactgggaatgttcccaacacaaataaatgacaaatggttgaagtgattgatattccaattaccatcatttgattattacacattgtattcatgtatcaaaatatcacatgtatccccaaaacatgtacaattatcgtgtatcaatttaaaaatacatcatgataggcacctctcaggttgactgtactgtcctgattattgctagtggtgttaacaaatttgaagctagtatctttaagaacgggcagacccatgagcatgcccttctggtttacacactggaagtgaaacaactaattgttggtgttaaaaaatggatttcactgaactatgccatcgccaacagagctatgtggaaatcaataaggaagtcagccctacattaagaatactggctacaaccgcaacacagtagtatttatgccaatttctggttggaatgctgacaacttgctaacatgccttggttaaagggtggagagtcacctgcagagatggcaataccagtgtagcacaccgcttgaagctctggattatatcataccaccagctcatccaactgacaaggcttgtgcctacctctccaggaagtctacaaaattggtagtattggtaatgtctttgtgggcctagtggtgactggtgccctcaaacccagcatgattggtcagctttgctccagttaacattacaactgaaataaagtcttttgaattgcaccatgaagctttaaatgaagctcttcttggggacaatgtgggcttcagtgtcaagaatgtgtctgtcaaagatgtttatcatggcaatatggcttgtgacagcgaaaatgactcgccaacggaagcagctggcttcctgaaccatccagcccaaatcagtgctggctctccacctctgttggattgtcacacagctcacattgcttgcaggtttgctgagctgaaggtggttgatttccttctggttagaagctggaagatgacccccattgtgatttttattgctatggtttctttctaatttagtcttgaggtctctcccttgagaatggtcataagccaagagagccactttctaggagagtcctgaccagggggaaagttaagtttgagtgtgtcagcttggtgagacacaatgaggaagtaaaaacaaaataaatagtggaatagaatactaacaagtacctagaaataagtctagctaaaaatttgcaaaatgtctatggaaaaaaaaactatggaaatttactgagaaactttaaagagtacctaaataactttcaagatataccacgtacatgaattggaaaacatgatatttgaaaatgtcggttattcccaaactgatttatagattcagtgcaacctgaatgaaaatcccaagacgttccttttgtagagctcaacaagctgattctaaaattaatatgaaaatgtaaaggtttatgaatagccaagtccttcttgaagaggaagaataagatgagagtaattgctgtctaatatattgagacttattttaaagctataataattaaaacaatgtagcagttggtatagggataatcaaacaggtaaatgaaatagaatagaaaatccaaaactagtctaacacatatagaaacttgatttatgacaaaggtgtcacagaagtagagtttcaataaaatgctggaaaatgttggtatctatatagataaaacattacattggattcctaactcacaccatacacaaaaatccattcacattgcattacaagtctaaaagtgaaatataaaatcataaacattttagaaagaaaatgtaaaagaatatatcaataaccacagggtagggaaagaaagagaattgacatcaagatacaaaaagccctagccaataaggtttttttttataaattccacacattaaaattacaaacttatgctcatcaaaagataacataaaaacaatgaaaagattagccacggaatggtaaatgtttgcaatacataacacaaaggacacacaaaggaaacttatataatagattttaacaggcttctctgtgtccttcttctccagcaatcaaggaatatataaaaaagcatatcaaggatatatagggtactcttttgattcaacaagaaaaaagcagattatccaagagaaaacttggcagaaaaaagcttggataggtgctccacaaaagaggacatccaaatgactgctactcataagaaaagatgctcaacctcatagaacatccaaaaatgtaaaaacacagtcaataccagatatttgtaataatttggagcaaatggaactctcatacattgctaatgaaaatggaaaatggtccagctgctttggaaaacagtgtggcaatacctaccaaagccaaacacatgcatacctagtaattccgcccaacagaaatgcacatatatgttcaccaaaagatatgcaccagaaggttatagcaggtccatatgaaagtgccaaagattataacaactcaaatgtccgtgattagggtatattcatataatactatacaacaatgggaatgaacaaactatagctacatatgataatatagatgaatctcacaaccagaatgctaagtgaaagaagaaacaaaagaatatatgtagtatgttttatttacacacttcaaaacaggcaaaactaaactatatttttaaaggatgtatacgtaactggtaaaattataaagaaaagcaaagaaatgattatcataaagatcagaatggtggttaccttcagtgggaagggagaaagtatgattgaaaagggacatccagtgagtcttgtgggttgttggcaatgttactgatctgggtgatgattgcatttatgtaccaaaggcatttgtgttttatgcactttattgtatatgttttagttcacaatttttttagttcacaattttaatagggctttaaaaagtaaaaagaaaagagatccaagggcttgaccatgggactctcttatatttggagtatgtttataaactttacattcattcaacattcgacaaatattttttgagcacctactttgtgccaagcaccgttacaggtgctgggaatacaacagggaacaaaacagacaaaaccccagctttcatggaacttacatgctaataaagcttggcaagagtatttcaaggaagatgaagtggttaactatgcaaaatgcttctcaggcacctaggaaaatgaggatgtgaggcatttctacccacttggtacataaaattattgcttttcctctgctttttttctccagggctcagagtggcagtgtccctcagttcaagaaagttgttttccaggaatttactgatggctcctttactcagcccttataccgtggagaactaaatgaacatttgggactcctggggccatatataagagcagaagttgaagataatatcatggtgagttaaggacagtggaattacaagaaaattaattttatatatttattttcttgctgactataatgtattcccacttttggaaatttttaaagtatagaaaaataattccataattatctttgtgtacgttctatttttcctatgtatttttctccttatgtattcaaattataccatgcagaattctgattcttgtttttttactaaatatcacatcataaacatttcttacgtcattaaaaacacttcctatgtatgtttttaaaatactgcataatagtctattatatgaatttatggaaccatagtttatgtaaccatttattttgaacaagcttttagacagtttcttttttcactatataaataacgctgtaatcacaacagtttttctaagataaaattccagaagtgcaatgtatttgagcatcttaagagtttttcttattaattatttggtaatgtcccttgcacatttgtctttcatggaggaagtgcttttcttattgattatgttaccttatatattagatagtaaaccactgaacattttaatgagaggtactttttcaagtttttgttttctcttaattttataaatgatggtttttgaaataaaacaggttttaatttttaggtagtaacccatcaatctttactttttgacactttcattgcttttatgtttataaaaattcctgcctatccagagattttttaaaaaacacctatactttcctcagtttttctcttacagtttaattttttacatttaactttttaatacttcctgtagactaaaagttattttggtgcattgtgtgaaccaaagatcaaagtagttttatttttttctgaaaatatctattcgttgtttcaattaattgatggtgtatattaaggatgtagaaggatctaaaattatggaattgtgggcaatttttgccttacattttattttactttccattatattctatgataaatatgtataatttttaatctggaaagtaagccttttttaaaagataatatgcattcattctagaatttgtcatgaagaaccttaacttacatatcaactcctggcgttatggtctcttataacccctgcagtaacattttcccttttactctggaatggcttttatgtgtttaggaattttctcctttgcaactttgagttcataccttaaatttagaatacaaaacctcctcaggattaggtttgagttctaacagcatccatcttctgtaccacttcttccagggtattaaaaactttgataaagaccaaaagacaggtatttcttttagggatgtaaaccctaaggaccttaagatcctagaagattattcttgcttttttttttttgtcgttattgttctacaggtaactttcagaaatcaggcctctcgtccctattccttctattctagccttatttcttatgaggaagatcagaggcaaggagcagaacctagaaaaaactttgtcaagcctaatgaaaccaaaacttacttttggaaagtgcaacatcatatggcacccactaaagatgagtttgactgcaaagcctgggcttatttctctgatgttgacctggtaagcaggtgtctattgtgctgaccactttttggtttaaaagaaatggtctttgtgtactaagaattttgatatttatcctacgtgcaataagaagctttaaataggagagttgatcattatatttgtgttttagaaatgtcattctggaatctactgaagaggatggattatatttttggaaggtgggaggcaggttggactggcataaaaattgatgagaaatccactctggttcataggtgagagagcttatactcataggattgatgtcttccctccctaggaaaaagatgtgcactcaggcctgattggaccccttctggtctgccacactaacacactgaaccctgctcatgggagacaagtgacagtacaggaatttgctctgtttttcaccatctttgatgagaccaaaagctggtacttcactgaaaatatggaaagaaactgcagggctccctgcaatatccagatggaagatcccacttttaaagagaattatcgcttccatggtaatatattccacatccaaacattatcactgtgaaatgcagattgcactttgacaaatgagacttgatccagggacttgaacattgtatttatttagagtatatctgtgggagtggaatcctcatagatgtcagtttttttggtggagtggagagaaagaaacttatataatagattttaacaggcttctctgtgtccttctccagcaatcaatggctacataatggatacactacctggcttagtaatggctcaggatcaaaggattcgatggtatctgctcagcatgggcagcaatgaaaacatccattctattcatttcagtggacatgtgttcactgtacgaaaaaaagaggagtataaaatggcactgtacaatctctatccaggtatgagcttgtttgtgctctttcttctacctactctatttgttgagtacttactttaaatggtctaggcactgggaacacaatcagtgatcaaagcagacaagctccatgctcttaagtaatactttttcaaatgctttttaaaccatttgttcaaagcaaatgaacaagataatttcagatatagaaaaattgctaaaaaggaaatagaacagaataaatggataattaatgtcacagtactttcctagggaaaaggaatttattcctttatcatttaccatctcaaatcccatagggcaccagtagtcatccaaagagtcatttgtttatgtatgtaaccagtatattgattaagcactactcataatgttgatcacaacacaattttattttggttcttcactgtccctttaaaatagatttggccaggtgcgatggctcacacttgtaatcccagcactttgggaggccaaggttggaggattgcttgaggccaggagttcaagaccagcctgggtgacaaagcaagacccccatctctacaaaaaataattagccagacatgtggtatatacctgtagtcccagctacttcacctacttgggtggctgaagtggaaggattgcttgagcccaggaggttgatgctgcagtgagctatgaaagtgccactgcactcaaacttggacaacagagcaagaccctgtctctaaaaaaaaaaaaccatccagtttaatagcgggggtaaactttccttatttcttcgtaaaaattctgataagccctgtaacttttctgctcacccttaagtaataaacaggactaaagtcactttatgtcacaaatacagttcaaatcagaaattacaatgtccatcccaagatattaatcaaaattgtaaacttgatttaacttcaatctcccctcctccaacttgagcctgcatcaggctggaagtctgcattggaaaagggagacatggttgagtcctctgtttctgtaccttgtgatgatcgtgcttccccacaacccctttatagctgctgttttgaactccaacatggataggttaaaggtaaggggataagatagttcttacctatttacagctggcaccattgttgtaaactagcttaacactgtttgtgcctggcaatacttgttgactctttctcctgcagggcactttcagggaactctttagagactcccttacgtgactgtcatgaaatccccttgacatgatttcttccacctttactctgggtggtcacttgtgactcatttctcagccctcagtgttcacctgcagcttcttgttgctggggtaactttacccttgtaggcagctctagtggactggatccagagggaactcaccctgacttatctgtttcacagagtccacatctggccaatgggaaacacaccttttgctcagaaagaccctgggaatgtaggtcaatcataatgcagtagcattctcctgtcccaaccatcaaagaattcagtcaccctgtttctcatctcctggggggaggggagtggtcagaactcaatctccacaacccccaactgtaagggtcacgtagcaagcactttgcatttgaggggtccaaaagtagtggaactaccaaatttggtaggtctactctgatatttcgcataaaccaatgtatctcatgctcattttttagtgaaaagaaataatttctgttcctgttggtttttataaggtgtttttgagacagtggaaatgttaccatccaaagctggaatttggcgggtggaatgccttattggcgagcatctacatgctgggatgagcacactttttctggtgtacagcaatagtgagtagcaatgtgggcagaggttccctacctactcagcctacttctttacagctttcttcctttctggaatggttgcttgtgtcaggaaataaatacaagtttacatcattatcaaatttaaaatgaatattgctggtagaaatcatcagagttctcagagtagggcagatatacttgaagctttgaacactttgtacctgaagctctaaataattgacaaaaaaaaaataccacctcattttcacaacttggtaaagctcgaagatctccagtagcagattttggaatttaatgttgatttagttaccagataacttagaaatactacttggaagagtttggagatttaaccctaaacaagtaagagagccactggtctatttatgtacggaccccagtttcttcagctgtaaaatgtgaatcattctagcacctgttaggattaattaaatgaactaatacagtaaaacgttgagtacagttcttggcacatttaaacactaaaaaatagcatttgttgacgttctcccattttcattgacttacatttgagaagctgaattttgtgcacttctagttactgtgttccacccgtttcatttcagagtgtcagactcccctgggaatggcttctggacacattagagattttcagattacagcttcaggacaatatggtaaatactattatttttgctccaagaacctgggctgattatatctttttttaataatctggtggagaatctcagataatgaatccatctccatgcttctattagttctattccataagtgcctctcaaatacatctcctcctctccacttcccactgtggccatcttaactcaggtcaccatcatttcttacctgggcaatgacactgcctccttaaatatcctccctaccttcagtatttcttccttgagtcaattcttttcagtgcagcaggaagctatactttcctatgagcagtaatggtaaagtttgactagggtctatagagaattctcagaaattgttttagagcactactgcccacaggctaaatgcagcacactgcctgtttttgtatggcatgtgagctatgaacagattttccatttttaaataattgtcaaaaagatgaagactatttcatgacatgtgaaattataaaattcaaatttcagcatccgtaataaagccttattttggaacacagccacgtccattaatttacatatcatctatggctacagcagcagtaacatagttgcaacagagaccatataatatgcaaagcctaaatgatttactatctggccctttacagaaaaagtttgccaacctatgttgttgtgaggtaaaaaaaaatcctcttgaaaaggaggcgtgagagttttacaccaaaatagtaacatttttcactaggtggaagggttacattttaaaatgtcttttatttgtatttttactaatttttacttttcattttctgatttttctacaatgaacatacattgcgtaataaataataggcggggcacgttggctcatgcctcccagcactttgcaaggctgaggcaagcagatcacctgaggtcaggagttcaagaccagcctggccaacatggtgaaactccgtctctactaaaaatacaaaaattagtcgggcatggtggtacgcgattgtagtcccagctacctaggagactgaggcaggagaattgcttgaactcaggaggtggaggttgcagtgagccaagatcatgccattgcactccagcctgggtgacaaagcaagactccatctcaaaaaaagaaagaaaagaagaaataatattattatttggtagtgttggtaacaaattgcagtatcagctagttagaggtgctaacaattaacaaaattataaattttagaaaataaaatggacaacaaggataagcaatatccttagatagtaattgatactggtatgccataaagcctttatgtttttctctattttcaccacagcttagattaacctttctcaagacaataattttattctcaagtgtctaggactaacccagctgaatttaatctctgtttctttacttgggcaaaggacagtgggccccaaagctggccagacttcattattccggatcaatcaatgcctggagcaccaaggagcccttttcttggatcaaggttagaaaatgtaatcaatgatgggaaatgtatcacattcaatcaattgcattacttattcctcttgcaagctcaaaggattctatgaatatgagaaaactaaagaacagaatgccttaatgatttgtacaaaagcagtcatgaacaaagagatatggggatagaattgagtatattgatatgtcctgtttctgtattttagtccttctactgggattagaacatctgaatattttctataatattgaactcgtcatctctcaagacagtatatgttattattagatgcttccaactgcccacgtgtccttaagtactccaatcccctttattttaacataaaacaaatggttcacaaatgcaaaccacatgtgtacttttacattttctgtagccacgttttcaaaaatgtgaaattcactttaataatacattttatttaactcaacatatctgaaaatactatcatttcaacatatgatcaatgaggccccttcaaagacagacagatggaaactcttgggtctcttccatgcctcacaaaagctgagggcagcttggaagtgcctgctcagcctctccacctaaacataaggctagatgccttctagaagcccaaacaggaaatggagaaaacattttggtttccatctttgcaaatagcatgtctattaatgccacagcattgttttgtagacactgccaattttgactcaatctgagctgctgttcactaatccctaagtattttttgttggtttgtgcttctgccaaacaacatgttatgttcttcaccttgtatttctatggttattttcaaccttaagtgtatccctatatagagaacatgtttatctatttggccaccctgtgtctgtctgtgctatttaattttttgtaataacattcttatttgggagggcggaattatatcttcctcactagatacaacctgataagactagtaaatagagtgtcctgtctgtgcctagccaatgaaccctgaatgatatactctgttgtttccacttactagatttggcccattgtttcagcttgccgatcttcagtgtcccaaagtatttcctagtttttccagttactgatttgatcagtaaactttctaatactgcagcaaagtcatgatcaaaatattgaagtagacaagacttccttagtatgtgcacaatacaaatcaagctgttaagtccttactacaaccttgtgaggtagatgttactatcatcttcatttcagataatgaaattgaagcatagagaggttattgtggcccaagtcacatggctaataagtgactgagccaaaattcaaattctgatagttgggctccagaaccctaactggtaatcgttgtactacactgtttccggaatgctccctttaagttgataaccatctattaactgtcactgttcacttgtggtaattaaaccagttacaaatccacctagttatgttatcatctaccactattgaatcgccttatcttcaaggtggttttgccatctgtcctactaaggtccagctagactttttatagatctcgtaactttataaaataaaccatggagatggagttgaaagggggtgctgacaaggaagggagttggagaaggcatctattctcgtgagaaggcctgaagagtgcacaacagcctggccccaagacacaagagcactgggctggcttgaggagcaccaggtgaccaagaccaggcaatgcacagggggaagtcagcaggccccatggagatacgcagctgcagtgtttgtacttttatacagtgaaactcattaccaccttgcttacttcctagtagagagatgtgtcttgtagttacactgaaacacctggctgggcacataggtgaagctgttgagtctgtaattgtcaaactgctcccaggtgccaattataatgtagaagaggcacaagaagatgaagtggataagcctggcagtttgtcaagcattcatcagttgtcaagcatttgtcagttgcagaatgtaggtaggctgccaaggctttattgtagcctggttctattgcagctttattctagcaaggctgctggaaaatacaataatcactggtccaagaaagaactcttatactctatctatatgaagaaacagtaaaagtcaattcagtagaaatcatgatttttgtgcctggtgctttcacttttttatgccacaataccaagaggttaaaatgaagtgtctttgattgggaataccatctatctgggaaaagacagggctgcaacttctgaagaccttgacactctgtcctgttaccctgcttcatttttctcctgcgcttatcactacttgatgctataaacaaataaaaacatatatgatataaggtctatttctcctactcaactgtaagttccatgagggcagggctttctttcttgtttactactctattccctgtatctaaaacagtgcttggcacatagcaagtgctaaaaaatattctttgaatgagtgtatgaatggaacttacagtcagctgaaggagacagttattaagcataagagtgatgaccagtccaattgtgtgtgtcaggcatgtgtgaaaacgtgctaaatttgacttgcttattaggacagtaactgatacttctaatgttcttgcagcccatgacctcttctttaagaagtgtccattctgtactactttcccattattcactcattcattccaaagcatttgctatacagcagtattataccagataccatattaggtgctggggctagagagaatataaaagctaacattgattgagtgtttagtatgcgccaggccctgaactcagcacattacatgtattaactctttaacccctatggcagccctttgagataaaaactaatattatcttcactttacagataagttgagacacagaaagttaggtgactcaaatgggttcactgccttaaggatctcagtctaataaggaaagcagaaaagcaaagcaaccttataatatggtgcaataatttgctataatgaagttatatacaaagtgaagtagaagcatagaagaagcagcactaaatttgtctgggtgagtcagagaaggctaaccaggaaaaatagtttctgaactaacacttgaaggaggtgtagcagttcatcactgacagtgatgttggggtgggtctggtttcaggagaggggaggaaattggctttggtctgaggctgaggtgtgggcaaagcattagcttatgtgggtccattagcttatgtgagtccacaaaaggtgtgtgtgtgtttgtgtgtatgtgtgtgtgtgtgtgtgtgtgtgtgtgtgtacgaaatgggggctcaatgatttggtagtggtttggtttgtcaagaagcaggctgggaactcaataagcatctttccattcatttctactgtgtatcccacagcttcacacacacatgcacatttcaacattggtgactgcttcacttgcacacctaaggtaatgatggacacacctgtagcaatgtagattcttcctaagctaataattagtttcaggaggtagcacatacatttaaaaataggttaaaataaagtgttattttaattggtaggtggatctgttggcaccaatgattattcacggcatcaagacccagggtgcccgtcagaagttctccagcctctacatctctcagtttatcatcatgtatagtcttgatgggaagaagtggcagacttatcgaggaaattccactggaaccttaatggtatgtaattagtcatttaaagggaatgcctgaatactttaaagaattttggcagatttcagatattggacaaacactcttagcttccacaaacttaattccaaaaaataatttttcacttatgagcaatagagttattacggacatatcagcaaaaatgtagtagtgtcaaggctcatagatgatagaaatgaagagatgctgtattgatagaaatatgtgattcaggactgtgtggattgatgattgtgagcttgcttatggatatcctaggtttgaggttatagtaggacaatcaggttgaaatgtccagcaggcagtaggtgaaagacaagtttagggggcaaaaccatggatggagatgaagattcatgacttccacataaaaggatgggtgaaactttgggaattgatgaattctctagaggtgagctcaagacccttaaaggcttaaaacctcagcgttattgtctactcttccctcatttttatgcccacaaatctggtcaatcctttatttgcaatgcctctcacatctctttcttctgtttccatttataccgctgttgccacagcccagggtcccatcacctcacacttgatctattgtattacattcctaactagtcttcccccgtttctaatctgttctccgataaaagctgcacatcattttcaggataatcatcagtcgcctgcctaaaacttttcaatgtcttcccattgtctttagaataaagttcaaagtcttcaaatgaccccaagcaagataacttttgtttgcccctttagatccattttcctgcttctctaccctgcttcttgttctgtgaggtgagcttgtatagaatacatcaacaggttaccttgtcctccagcttttggttggatttcaccaacagggagcactggcaaaagattggcatatttattcttctgactttctccttgcagaggagttcactgtatctccccacttaaggtcactgtttccctcagagtggctttttctacctgtactagctactattgctgtgtaccaagccacttcaaaacttgctgtcataacaataaccattatgttttgctcacagattctgtagatcaagactgggacacagtggggatgggtggtttctggagcctcagttaggattatttaacagctgggtgctggaatcatctggaagttccttctcttgcttttctggtggttggtactgactgtcagctaggacagaatctggggttgttgactgatgtaactttacatggattatccctgaggcctggccttccttacagcatgtttcaaggtagttggacttctttttgagggggggtaggaaggtggggggaggacagagtctcactctgttgcccaggctggagtgcactggtgtgatctcggctcactgcaacctctgcctcccgggctcaagtgattctcctgcctcagcctgctgagtagctgggactacgggctcatgccaccacacccagctaatttttgtatttttagtagagacagggttttgccatgttgaccaggctggtcttgaactcctgacctcaggtgatccgcccacctcagcctcccaaagtgctgggattacaggcacccggcctgtagttggacttcttacacgtcattttagggcctccaagtgtgagtgttacagttaacaaggtgaagactacataaccttttctgaccgagtcttctaagttatgtagcatcacttttgttgacaaaaagtgttgaactctataaaatatttgaagagatttattctgagccaaatatgagtgagtatggcccatgacacagccctcaggaggtcctgagaacatgtgcccaagatggtcagggcacagcttggttttatacattttagagaggcttgagacatcaatcaaatacatttaagaaatacactgatttggtccagaaaggcgggacaactcaacctgggggcttccgggctataggtgaatttaaacattttctggttgacaattggttgagtttgtctgaagacctgggattgatagaaagggaatgttcaggttaagataaacattgtggagaccaaagttcttttgaagtcttatagtggctccccttagagacaatagatgacaaatgttttgtattcagatcttagttaatctctttaggattgggaggggctgggagaaaaagatctagctatgttaatagagattctttacagttgcaaatttccctccacaaagaacagctttgcagggccatttcaaaatatggcaaaaaaacatgttttggggtaaaatattttgattttcttccttgtctcataatgttatgccagagtaaggttggaaagtaaatcatgacatataaggttaaataaaacccatctgatgagaatttatgatttgtagggcatgactccccagaccccttagataggaatttgggcaagataaaaaaaaatcagagtttagtcctcactttcaatacattctattggttataagcaaatcgcatatccacccagattcaaggggaagagacatagaccctaatttttaatgggagaaatgttaaataattggtggtcattttttaaagccactacaataatctatccaattctctctttcaggatgtttctctcttctgatcctttcaggtttagggattgtcaacaaacaaaaagttaaaccctgtaaaatacttgaagagatttattatgagccaaatatgagagaccaatggcctgtgacacagccctcaggagatcctgagaacatgtgctcaaggtggtctggctacaacttggttttacgcattttagggagacataagaccgaaatcaatagatggaagatgtacattcattgagtttggaaaggcaggacaactggaagcgaggcggggcttccaggtcgtaggtagattcaaagattttctgattggcaattggttgaaagagttaagttattgtgtaaagacttagaatcaatagagaggaacatcggggttaagataaggggttgtgaagaccaaggttctgtcatgcagatgaagcctccaggtagcaggcttcagagagaatagattgtaaatgtttcttatcagacttaaagagtctgttctatcagtctgaaggtctgtgttgatgttaatgctggtcagatttttctgaattccaaaagggaggcgggtataataaggcatatttgatccccactttcccatcatggcctgaacgtttttcaggttaactttggaaggccctttgccgaaaggaggggggattagaattttattttgggtttacaggatggtaatactctgttcccaccctcctaactagtatctttattaaaccttccacaaattatcctaatttccatgttttctgttccttgctggatcccttgtttcatacagtaattggtgctagaagaaaccccaggaaacagattttcaaaatgcaattctaaggttatgttgctaatatattcaagaaacacagagataacatatttgccaaggaagaaaatgagcagttagggaatccatgacatgtgttagtattatagtttctcagattatcaccagtgatactatgggatgagttgcagatggcaagtaagacactggggagattaaatgacagtggcatttagtcactgtggcaacaaacgtagcattacctgattgtagagtggtctgtcttcttacagccctagagggcatacacatggaaaaagaaatgaaatgttatgaatatatacaaaataagaacactgatgaacatacatggaaaatcaggatgcatgcatagagcttttgaggaatactccgtatcctgtggttgtaggcagatacgacttaggggctgagcataagttgcagagctgcagtgacaattaaatgcttaactccaccagatctattatgctgtggtaagagtaccggtgggaaggagtgaaactctgaggcctgagatggaggcatttaggcagacatggatgaggctgagaattgcaaacctccaaattcccctgaacctcctttgcctgaggaggcaaccactccccagtctctgaagcagtcatccctcttttgtgtaaaagcctttcagtggctataactgagataggtgcctcacaaaccagtgactattctccttagagaccctgtttggacactacgaaagccaggcgagtcacagaaaatgacagcagatcacaaatttaatcaggtggtgatgccaaaaaacaattgcaattccagatatcatatctctgttgaagcaaatttacacagccccaggcacctgatatggaagtattgacctagagaatgttttttcttcatttccatacattagtaaaatcagaatacatttgaatttaccaagtaggaacaagagtattaagtttactgcccatgcatcagggcaatgttagctctcttgttttctatcataatatagactcaagggacctcaaacatctttacatcccacaagcacaatgcctgtccattacactgatgacattatgctgacaggatctggtaaacacataacaaataagcctgtcttgctcttgactttaatgagaatgtaacctgtgtttcactgtttaatataatgttcactgttagtttcaaatactttttatgatgtttaaaaagttttctcctatccctattttatttgcaatggcaactgaattttatcaaatgcttttccagcatctttgacatggtcacatttctcttttgtgttgtcaaattatacttaacattcaatagtgtgctgacaagaaattaacaacccacaggggagcaaagtgagaagaggttaagaagtaaaggccttgatttatagcattggcagatttccctgacataaatactactcccatcatgcctggccccagggatgggaagagatgcttacttacaattggctctcacagaccagtgcaagagcactactgtgctccatttctgggaaaactttcgtcagtcatagtgtgttagttatttaaaacttagctggatccaatttgccaacatttcatttataatttctatatctatattcatgaatgaaatgggtttagctttttcagtagctctacttaccaggttttggcatgagggttatattaaacttgaaaataaagtgggaaagcttccatttttttccatgaagactattgctctagaatagcttatttaatgtaggaatccagtatttaatgagagtaaatgaaaaagccatatgagccatgtgctttatttagtgagagatactaggctatattttccaatcgttatatgattattgctattctcatttgtgttgccttgagttaatgtctgcaaatgtgcacattagagtcatatatcccttcctgtgccatacatctatatctgtatacacacatatgtcttttctccttttttcccttctgtatcaagagttggcaagtgtttgtctattctattaatttttcaaagaatcagctcagttttaaacccaaacgtggttttgaaagagctgtttctagttcatcaatctctgttcaaaactttaaaaattctattttcctttcttttggtttgtttcctacaatctggaggtgaatgcttagttcacttattcttcaatctttgtattttaacgataaggataaattacttacagttattaactactctcatgaggttcattccttgaacagtcactgagcaactactatgtcctgggttctaattcaggggtgggcaaactatagccccagaatttggcccatagcctgcttttgtacggactgtgagttaagaatagtttttacacgttgaaaggattgcaaagacaaacatacaaagaaacaaagaagactgtgcaacagagaccacctgtggtctgtaaagactaacacatttctatcccgcccttgacagaaagagtctgtgggctgctggtctcctctaacggtggtagagatgcctgcacggttaacattaatccttggcaccagaatcctcagcacctaggaaccagatcttgcctaacacgctaatttcagtcttgaccaccttcctccggcgtagcggttctcaaacgtctttgtctttgtactattcacgtataaaatattctttcataagcaacatttatccttttgggaatacctcacaatggggagaaggggaaccccaacagcctttaagggttcactgcttcgctgccaccatttccgacggtttacactgttttaagtgtgaatttggaattgttttcaagttaaaaagcaaactaatcatgtcctctgaaagtatttgcttttggcatgctagaaatcagtgttgacttttgatactgatgtgatacattacgagggaattctcaaaactgctgaaatctggcctcggcccagttatcactgctcttaagcttctgagggagatacatgaatgagcccacggcaaatggaaaacgaggagttttagtgtttcctagaattatgctcagatacccactacctgaccgtctggttatccttcccctcacctccctgacgcaaggagtttggaccagaggcctaaggaggcttctcctgaagcccaaatcccaaactggtcaccagtcatgctccgtaactcctgaacctgacaagaagccagccggccaggtctgcagcccgggttaagaggagcataccaggaaagagccaaagagcaaaggagcatgagcccttcaaccgcttttacaataatttgggctaggcgttcagggctccgtaggacccttcctggcagccaagtgagagaaagaggaatgatggtggaatgggcctctcctgtgcttcccattacttccacactgtcgaaatagaaatagaagcagaaaagaacaccctacaagtcccacccatttggaggcactcaactcacagtgacaaccctccacacctctcccctgcaaaaagacgcaaaacaaaaacacctactccaaactgtgtccttacatctcagccccgaagatcaggattgtgtgcaacttcggcccaaaggatgcatttccccagggttgaaagtttgagaaagaggctatattctgaagagttcttgttgtcaccatcaaaaggattaaaaagacgcaataaataagaaaacagcgtagttggggggcatgctccatttgagccagaaagccttggaaacttaagtgttctcaaacggaacgccatcctgctttgggggaacacggaggctgccttgcagtcacgtgatcgcacaacaccaaagggccacgcactctgatttcacctacttaactaaaagttgcagcaaaatccctattacaggccaggcgtggtggctcatgcctgtaatcccagcactttgggaggccgaggagggtggatcatttgaggtcaggagttggagaccagcttggccaacatggtgagaccccatctctattaaaaatacaaaaattagcccagcgtggtggtgcacgcctgtaatcccaggcaccctggaggttgaggtaggagaatcgcttgaacccaggaggcggaggttgcagtgagccgagatcacgccactgcgctcctgcctgggcgacagagtgagactccatctcggggggaaaaaaaaaaaaaaaaaaaaaaaaaatccctattacaaataaaagctgttgtgatccagactgcatatacctctgcgaatggaaccagaaccgtgaattccaatgcaaatcgatgcatcggcaccagacccgctgcactggatgtatctgcattgcagtcacccgagtacggagcacatcatagatgatctctgcaggttcgttgcccacataggaggcatagcgcaaatttcaaaggaacgaatacatcctggagcccaaacagctatctggttctgctgctggcctcctgacaagtaggtaagagagtcacattttatagacgacggacaccaaaaccacacatgaggagtacaagagtagctttatcatggatttagggctgtggttacaaggaagctgtaaggaataaaatgactcccatgaagacgtaccgtgcggacgagtggaaggagaaatttggccattacaaagacacaggaatatgttaagaagtgaggggcaggatgaaatcatctagggtaggtatttagagggagggcgccgtgcaaaataaaatcctcactatgaaacaaaggcggaggcaggaggctgcgttaggtggaagcagcggaggaaggagacgaaagggattgtcattttcatgtcgtggctttttagaagacagccatgtcctctactctgattctatcaaaatgtgttctcggggtgctggtaacgttcagccaacgaaataattcctatggcggcagtaggaataacaaaacgcagaagcgggaacgatgtctttttattcctccccagacgcaaacgtggatgcatgaggtttggtaacaggcaaagtcatctggttaacgtgactgatgcaaaaagtccaggcctgggcaaaaagaagtcactgggtgaatgggatggatcagactccctgtcctgagggggagatggtttcttgcagaacgaggtgaaggaggtggttctgctcagcagtcaacagtggccacatctccacctgcagcgacttgatggcttccgtgtccttttcgtgggtagccatgaccaaagactggagcagcagaaagagctcctcgggaagctggccgctgctctcctgcccgtggctgtcaaaagcctcccaggagtacttctccagggtctgggcgtgctccggcagcagcttggcgggcggtggttgcaggaggagcagcagcagcacgcgggacacctcgcagcggaccagcacgtccgagaaggcgcccagggcggcgggagagggcgccgccgagccggagttcggaggaagcagcgcggccggtagggcgggcgtcgccccgggcccgggctggggtgccggcggcgggggcggcggcagtgactgcaccgggtggctgccgtgctcccgcgccaggcgctgcatgcgcgtgaagaccgccagggcgccggtgtagtcgcgcgccagcagctggcaggaggcggcctcgccaagcgcctgcagcgcggccaggggcagctggggcagctggagctgggcggcgcgctggaagtgaccggcggcggcggccggctggcccaggtcgcgcagggcggcggccagctcgaggcagagggcggcggcggcggccggctggcccagctcgaggtgcagacgcaccgcggcgcccagggcgctggcggcggcctgcagcggctccccgtaggcggcggggcagaccaggcgctggcgcgcgtcgcgctcctgccgcaggaagaggcgggcggcctcggtgagggccagcgcctccccgggcccgtggaagagcgcctgctggcagcgcgccaccgccagctggcaccaggccgcgtagggcagacactcctgggcgcgcagctcccggcccagctgtccgaactgctcgccggcctccgccacgttcggcttccgcaggaaccgcttcttcagcttgttcgataccagccggtagcgggccaggaagtccccggcctcgggtcccgggccggcgccgccgccgcccaggcctgcagccgctgccgccatgctcgccgccccaagcacttcccgacgcgccgccgcagctggcgggcgggccggggcggggcgacgtgccctgcgtccccctcggcgggctgccgccgtgcccgcgccggctccccagcccgagcctgccccttgccctgatgaggtgcaaagagcgggatcggaggcggggcctggccgggctgtgagcggcgtatgcaaatcgagggtctcggggatgcggatccaagaccctgggaaggtacgcggggcctggcggggcaccagctgctgctagctcggctgcaatgcaagtggtctaggttgctaaaggcatcccacagcctctccatctgaacatgacccaaacgaaactcgtgaccctaattccatgtctgcgcatttctagactgttgtccccccccccccccgccccgactactcagtcctccgtcttccggtccagggccccttgccaagcaccgggtccacctctccgtccccaccccggttgccttagaagtccgtcctgtcgcaacactgcagtcatggtcttgaggcccacccgccccaacgaacaccatcatgctgaggactttcccgggcaggccctgacttgctcagaaccagcgggggtgtccccttcccacccagggccactcccctgcactgtcacccggagagactgctcctctgtgccatccctggctcccacccaaccccagacccccaccacctctccatccctccagctgtggaggtctcacaaccccccaacccatctcaccgcccccccacccccaccccaaggcaaagtgactgaagcgggcagatggcttccttgaaacattttattgacagaattaatgaaggcccaagactttggggcctgggttgtggggggagggtgtttaaggccgggggttcaggccgggggatttggggccgggtgggtggacgagtggacctgtcaggtcccaggggccgggtgtcagaagctagtcctcgccaggggccacttgagagatggtggtcgtgttgaaaagggtgctcagtagcctgtcgttgtgaaccaccatgtccagcagcaggggagtgatgttccgctctccgctgttctgggcctcgttgcccgccagctccgggaccttggccgtcaggtactcaataaccgcagcgaggtagaccggcgccgtgcgactcaggcgctgagcgtagtggccctcccgtagactgcgctccacctggctcactgaaaacgaaagctccgctcggacggtgcgagagcaggtccgcccccggccgccagcaccggaggaccctcggcgtctcctcctcctcggcatgctgggcgttgagtgtgctatctcggcttggcccagctaggcaagatggctctcaagaggacagttaccgcgtccagtactgtgtatcctagcgaccagggcccagcccctcattggctagggagccgagaccaatgggcacgcacatccggcgacgggcacgcatgtggtgacggcccctcacaagggacacacgtccgtcaggtgacctcatcactttcccattggcctcgagggagcaggcctgggcctagaagtggctggagggccgtgggggtggggtggggcggggcagggggaatcgcgctggtgaccctctctttgccagtgggaactttccctttctactggatgggaacaccgtgggaaagacaaaggggtgggcgaggggaggacgggtaccacgccttcacaatgttgcacatccatcacgaccacctagttccaaaacgttttcaacaccccgaaaagaaaccgaaacccctgtacctataagcagtcacttgccgcacgcctccttccacaccaccactaccagcccccacaccctcccacacacaccccctgcccccgcccatacacacgttcccgatagtccctggcaacccctagtccatctgctttctgtccatagaggttagcctgttctggagatttcctatagatggaattatacgaccaaatgtgaggccgtgtgtgtctggctgctttcacttagcgtaatggtttcatcagggtgcatccatgtagaggcatgaatcactacttccttcctttgaatgactgagtacgattctgttgtatgaataggaggccacattttgtttacccactcgtcagttgatggacaggttatttcccccttctggctattgtgagtggcactgccatgaccatctctctacaggtttttctttgaatatctcttttcagttcttttgggtctatttctagcagtcaaactgctggctcgtgtggtaattctgtttaacttattgaggaaccaccaaactgatttccacagcagctgtaatctttcgcattcccaacagtagtgcatgagagtcccaatttcttcacagcctcatcaaaacctgttttctgtttgcctcattttgttttgtttacagtagccatcctactgggtgtcaagtgctatctcatggtggttttcattcgtatttcccaaatggctaatgatgttgctgtggtttgagtgcatcccccaaattgtgtgtcttggaaacttaatccccaaattcacatgttgattggaggcgcagcctctgagacggtaattaggattagataaggtcatcggggtgagacccccaggatgcgactggtggctttataagaataggaagagaggcctgaaacgacatacacgctcttgccctctcgccgtgtgataccctctgccgtccccagatgccgggtcacttcccagtccccagaacggtaagaaataaatttcttttctttataaattgttcagtgtcgggtattcaattatggcaacagaaaacagactaagacatcttttcatgtgcttcttggccctctgtacctctgctttggaggaatgtctattcaagccctttgcccattttttaattcggttgattgtattttggctgtgggcttctaaaacttattcatatattctggaaaatagactcttatcagatatgtgacttgcaaatgtttctcccattcactttctggatagagccctttgttgcccaaaagatttacatttggatgtagtccaacttgccaaatgaaaagatatctgtggctttgcctttggtgtcatactgaaggagctgttgcctaatccaaggtcgtgcaaagttacatctccgttttcttcttagagttttatagtttcagcccttacatttagatctgtgatccattttgaattaattctttacatgatgtgaggtaggggtccaggggccttcttttgcatgtggctatccagttgtcccagcgcagtttgttgaggggattattcttcccctccacccattgaggggtgccggaactcttactgaaaataaactttacataaatatatgggtttattcctgactctgagttctgtaacattgacctaatgtatcgatcacgatggcagtaccacccttttcggattactgcggttttgtagtacgttttgaaattgggaagtgtgagtccttcaacttttttcttttctgagattgttttggctatctgagccccttacattttcttatgaattttaggatcagcttgtcagtttttacaaagaaggcaggttggattctgacaggcatcacgatgaatctgtatattgccttggagattatgggcatcttaacaatattaagtgtcccaatccgttaacacaaaatgcctttcgatttatttaggtcttctttaatttattttagcaacgtcttgaaattttcagagtatacatcttgtacacctttagttaaatttattcctcgacattttattgtttcgatgctactgtaaaatgaatcatttccttaatcttattttcatgttattcattgctagggtgtagaaatacaaccgactgttgcagattgatcttggatactgcaactttgctgagccgaatatgctttgctgagcatactcagacagggttggcatattagtccgttcctacactgctataaagaactgcctgagaatgggtaattcctaaagaaaagaggtttaattgcctcatggttctgcaggctgtacaaggcttctgcttctgggcaggcctcaggaaacgtgcaatcatggcggaaggcgaaggggaagcaagcaccttcttcacatgttggagcaggaggaagagagagagaacgcacgcaaagggggaagcgctgcacattttcaaacaatcatcagatcttgtgagcgctctatcagaagaatagcaagggggaagtccgcccccatgattcaatcacctcccactaggcccttccttcaacaggtggggattacaattcgacatgagatttgggtggggacacagagccaaaccgtctcagttttttttttttttcttttgttggactctttagtgtcctctatataagaacatgccatctatgcatctatgaatagagatggttttacttgttcctttccgatctggatgccttttatttctttttcttgactaattgccctgactagaactttgagtacgatgttgagttacaagtggcattcctgatcttagggggaaatcaaccagtctttcaccattaagtatgatattatctctgggtttttcatggatgccctctatcaggttgaagaagtttctttctgttcctggtttgttgaatttattttcatgaaagggtactgcgttttgtcaaatgatcctttttgtacatgattaagatgaccatgagccccctcccccgcccccgctccgccatgcattctgttaatatggtgtattatataaattgattttcacatgttgaaccaaccttacatttgtgggataaatcctatttggtcatagtgtataaagagtggtcaataaacatttcgttgaaagaataggagtggatctggcaagcttcttggaggacaatgtgtgtgttaaagaatctgtagcatgatgagaagccaaggcaccggtgggaggaggggagttgcaaccaattcattaaggctggagagtacgatgccagtggagcagtagtggttgatgtggctgggaaagaggtaggcaggagccaagacatggaggttctattatgccatgctcaggttttagaataccctgtaggctacactgaacccactgtggtctttcagcttgggagtgacgtggtctgatttgcctctagaaatatcaccctggaagctgtgtggagaatagaacagagaggattgtgtgtggagaatagaacagagaggactgagattggaattagaaagctgctgtattataccagtcaagaaatgacagatatctcaactaagacaatggcattggtagataagactaggggacagagtccataaaaagtttaggtagtaaaatggcacacagtagacactcactacatattactcatactggtgaacctagctggagacatgataattcatgtgctcattcttcaaaaaatattgaagggtagtgccaggtatactgtgttaagcattgagacaacaccaacgagaaatattctgttgtataaataggccacattttgtttatctactcatcagttgatgaacagttcattaaatgatttccatggcaggggaggtaaatgttgtcctctatcctcttagattctccagctaggacttaaataagatagattaacaaaagaaaagcatacaaaattttatttggcattttttacatgtacatgggagccctcataagaaatacgaagactcaagtgattaattacagctgaatacttacatactagggtgggaaaagtatggtaaattgtgaaaacataacaagacattggggtttgggctaggagagttaattgtggaaaagtcactaagaaggtaagagttgtgtaacaaggttttttggtgcagctttccctcaagcctggactccccatctctggcaataagaatgtgtttcttcttcctggtatacagataatacctttcacatcagagtttcatctcttcctttcatgaaaaaaaaaggaaggtcagtgtgcccttcttgcatctgctactttcaagtgcctttaaacacaaaataatcaatatgccaaagtggcatattttgaggtggcatttgatcccctacattactgattggatagtgtgaatagtgctgccatgaacgctcctgtacaagtgtttgtttgaacagatgttttaaattgcagacgctcctcaacttgggatggtattatatcctgataaacccattgttagttaaaaccattattagtgtaaattcatttaatacagctatattagtccattctcacactgctataaagaactacctgagacttggtaatttatgaagaaaagaggtttaatggactcacagttctgcaggcttaacaggaagcatgactgtgaggcctcaggaaacttacagtcccagcagcaggtaaaggggaagcaagcacgccttaccatggtggagcaggagagacagagagtgaaggacggaaatgtcatacacttttaaaccatcagatctcatgagaactcactcactgtctcaagaacagcaaggggaaatccacccccatgatccaatcacctcccaccaggcctctcctctgacacacggggattacaattcgatgtgagatttgggtggggatacagagccaaaccatatcagcggctaacctaccaatcatcataatttagccaggcctaccttaaacatgctcagaacacttacaattaggctacagttgggcaaaatcatataacgtaaagccaaatttataatgaagtgttgactatctcacgtaatttattcaatattgcactgaaagtgaaaggcagaatggttgtatgtgtactttaagtacttttatgcatatggattctactgaatgcatgttgctttcataccatcataaagtcaaaatattgtaagtccaaccattataagctgggaaccatccatatttgaggtacatacccatgaatatatttatgggtttatttcttgcttcttaattctattccatttatatatatgtctgtccttatgccagtaccacaaagcattgataactgtagctttatacgaagttttgaatttgggaaatgtgagttatccagctttgttattttttaggattattttggctatttgaggtcttgcacaattacacatgaattttaagattggcttttccatttctgccaaaaaaaaaatggccattgggattttgatgcagattgtattaaatctgtagatcactttgggtagtactatcatcttaataatattgtcttccaattcatgaacacaggatatattttcacttctttatgctgtctctaatatctttcagcaatgttttgtagttttcagtgtacaagtcttttacctccttagctgaatttattcctaagtattttattctttttgatgctattttaaatagaattattttttattttgttaatttcatctcagattgttcattgctagtgtgtagaaatacaactgatttttgcacgttgatcttatatcttgcaactttgctgaattcgtttattagctctatagtgttttgtggattcttcggggttttccatacataagctcatgttcatctgagaataagatagctttacttattccttttcaatttggatgccttttatttctttttttcctaattgctctggctaagacttccaatacaattttgaatagaagcagtaaaagcaggcattcttgtctcgtttctaatgttagggaaatatctttcagtcttctaccattgagtgtgatgttagttttgggtattttatgaatgctctttatcatgttgtggattttctcttccatttctagtttgcttagtggtttttttttttttttttttttttggtcatgaaaaggtgctcagctttatcaagtgatttttctgcatcaaccagaatgaacttgcaggggtttttttccctatattttattaatgtggagttgactgggggattgattgtcttatgttgaaccagtcttgcattattgggataatttccacttgagcatgggctataacctttataacatgctgctggatttggtttgctaatattttgttgaagatttttgcacctagatgcataagggaatattatactcacatattcaattacatgcaatttgtaattttcttttcttgtgatatatttgtctggctttgatatcaagatatggtggcctcatagtatgagttgtaaagtttactctccttttctgtctcttggaagagtttaagaaggattaatgttaatccttccttaaacatttagtagaatttaccagtgaggccttctagcacaatgcctggcacataatatatggaatctaggatttgtatagtcagtcattaactatttgttgaattaataaattgtctccccaagcaggtttctaatcaaggcacaaagattgagtaacgaatgaaggcaaagccaatgtatacagggtattagttttctaatgctggggtggcaaattaccacaaacttaatatggcttaaaacaacacaagtttattatcttacagttcgatagggcagaagactgacccaagtcttactgggctaaaatcaaggtgtcatcagggctgcatttctttctggaagctctagaaaaggatcctttttcggtcgcctgtagtcccagctactcgggaggctgaggcaggagaatggcgtgaacccgggaggcggagcttgcagtgagcggagatggcgccactgcactccagcctgggcgacagagtgagactccctctcaaaaaaaaagaaaaagaaaaggatcctttttcctttcttttccagcttctagaggccacacacattcattaactcatggcttccttcctccatcttcgaagccagtaacattgcacctttgtgactattcttaagtagtcacgtctccctttgactctcctcttctgcctctctctctcactttcaaggcctcttgtgattacattgggccgacctggataatccaggatattctccctattttgacatcagctaattggcaaacttaattccatctgcaaccttaaatccctcttgccatgcaacataacacagtcaaatgttctggggattaaaatgtggacatcactgagagatcatattcttcctagcacatacggtttagtcacaagttaatgatcaacatttattagctatataatactcttaagttcaacataaactttttggatgctgataaaacggaatggcattttacattgatatatacttcatttcaaaacttcttctacttctcaatgattattctgtagcaacaaatttcttttaaatcagaaatttggaaacataacgagacctatctcaaatcaaagatgactatccccttttggagtcagactacacattcattattttagtcaaaatgagacataaaattcaggcccccaagagctgccagtacccacttacgcaggaggtagctagacgaaacaggtagctttctacaaatgattttgcaccatcccaccccagagaggtggtttggagtgtttacttattacctgggatttaattatactagctcttgcaaaagccaaatctaaaggccataaatagaaggtcaaattttctcctatatagaaaggagagcagcagagaaaacaaaatccttggtaaatctttaaacaaagttatatggtttgaatatgttattcattctattttaaccccccaatacagatatatttataaaaaagaatattgtgatttctggtataacttgtttaggaacaaagccacaaatttattaatattttctattccctgggaagaaaaaaatgctacatggcagaataattttttaaaatttccagccgggcacggtggcttatgcctgtaatcccagcactttgggaggccgaggtgggcggatcacaaggtcaggagattgagaccatcctggctaacacggtgaaacaccgtctctactaaaaatacaaaacattagctgggtgtggtggtgggcgcctgtagtcccagctactcgggaggctgaggcaagagaatggcgtgaacccgggaggcggagcttgcagtgagccgagatcgcgccacggcactccagcctgggcgacagagcgagactccgtctcaaaaaaaaaaaaaaaaaaaaaattcccatgatactaaactgatgtgtgatcatataatagacttacactgatacctattttagtgtattcaagcagataaaaaatcccaggtgttctatgagtgatatcattttcagtatttcttatgctgtatgccatggtttaaatctaggcctttcgaattggcattactaccatatttctcaaactgtattccctttctcttgaatatgttatgtaattttgtccagaacccagacatgtcaaggtgtcaaatcccacgttttggatactaacgtgtctcattaattcatacagtgggatcattcattaatgcccacattatagactctctctctctctacacacacacacacacacacacacacacacacacacactacattcttagaagatcattctgagaccagggtggaggataggctgtgcattcccagtactctttcacagctgactgtgtcctctgccagtgttttcaaactttactgcttatgaaacagctaagggtcttattaaaatttagattctgattcagtagaactgacatggtgcccaaggaactgcatctcttttaaaaaatctttatttaggtataattgacaaaagttgcatatatttaagaggtacaacttgatgttttgatatattttgtttttcatatatgatgtttgatacattgtgaaatggtcaccacaagcaagctaattaagatatatctatctctttgcctagctacctttttttgtggtgagaacatttatgacctactcttttagcaaatttcaagtatacaatattgtttactatagttactatatcgtacattagatctccagaactaatttatcttgcataattgaaattttgtaccctttgatcaacatctccctgtttcccccacaccacagtccctagcacctaagattctactgtctgcttttatgagtttgaccatcttagattccacatatgaggtcatgaagtatttttctttcagtgtctggcttattacacttagcataatattttccaggttcatccatgttatcacaagtgggaggattttcttctattttaaggccaaataatattttataattgtgggaatattccatcagatatatatatatcagattgtctttatccctccatccatcaatggacacacttaggttgtttccatatcttgactattgtgaatactgttacagtgaacatgggagtgcagatattcaacatactgattttgtatcctttggatatataacagaagtgagattgccagatcacatggtattcatttttagtttttttgaggaacctctatgctgtttttcataatggctgtaccaatttatttttgcagcaacagtgtacaaaggtttccttttctccacattaccaccaacatttgtcatcttttgtctttttgataatagctatttgctatggtttgagtgttttccccaaaaaacatgtgttggaaacttaattcccaatgcgacagtgttgggaggtagggccgaatgggagatgtttaggttatgaggactccaccctcatgaatggattaatgccgattacaaaagcacctaaggctgtgaatttgaattgctctctcttgccctctttttgcccttctgccatgttatgatatagaaagaaggcctttgccagatgctggcctcttgatcttggactgcccagcctccagaactgtgagccaaatacatttctgttcactacaaattactcagtctgtggtattctgtcatagcagcataataaattagagtccataataagttatagtccataacagactaagacactattctaatagatgtgagggaatatctcattgtgttttgatttgcatttccctgtgggttagtgatgctgagcatcatttatctgttggccttttatatttcttcttttgaaaaattctatttgggttctttgcccatttttaattgggttgtttcttactaatgagttgtttgagtttcttacccattatcagatatacagtttgcaaatattttcatccattccataggttgtcttttcactctgttgattatttcttttgctgtgcagaaagtttttagtttaatgcaatcccagtttctatttttgtttttgttgcctgtgcttttggtgtcatataaaaaaattattgcccaaatcaatatcaggtagcttttttcctgttttcttctaggagttttatagtttcaggtcttatatacaagtgtttaatcaattttgagttgaattttatgtatagtgtgagaaaagggcccaatttctttcttctgcatgtggatattcagttttcccaatatcatttattgaagagactctcttttccccgttgtgtgttcttggcacccttgtcaaaaatctgttgactgtaaatgtgtgaacttatttctgggcttttctattctgttcccttggttgatgtgtctatttttatgccagtaccatactattttgattactggagacttgtagtatattttgaaatcaggaagtatgatgcctctagctttgttcttcttgcttaagattgctttgccaggctgcatgtggtggcccacgcctgtaatcccagcactttgggaggctgaggtgggtggatcacttgaggtcagaagtttaagagcagcctggccaacatggtgaaaccccgtctctactgaaaaaatacaaaaattagccaggtgtggtagcaggcccctgtgatcccagctaatctggaggctgaggtggagaatcacttaaacctgggaggcagaggttgtagtgagccaagatcgcaccactgcactccagcctgggcaacagagcaagactctgtctcaaaaaaaaaaaaaaaagattgctttgcctccttggggtcttttgtgatttcatattaattaaaattttttttttatttctgtgaagaacaccattgagattttgatagggatcacatcaaatctatagattactttgggtagtgtggacattttaacaatactaattcttccaatctaggaatatggaatatcttttatttatctgtgtcttctttaatttccttcataaatgttttctatattttcattgtacaagtctttcatttctttggttaagtctattcctaagtattttattcttttgttgctattgtaaataagattattttctaatttcctttgggatattttatagtgtatagaaacaccactgatttctgtatgttgattttgtatcctgcaactttacagaattcatgtattagttctaacaatttttttttgagtctttagagttttctacatgtatgatcatgtcatctgcaaaaagagataattttactattctcttctatttggatgctttttattttatttattttttaaattatattttaagttctgggttacatgagcagaacatgcagttttgttacataggtatacacgtgccctggtggtttgctgcacccatcaacccgtcacctacattaggtatttctcctaatgttatccctcccctagccccccaccccccaacaggccccagcgtgtgatgttccactccctgtttccatgtgttctcattgttcagctcccacttatgagtgagaacatgcagtgtttggttttctgatcttgtgatagtttttgagaatgatggtttccagcttcatccatgtccctgcaaaggacaggaactcatccttttttatggctgtatagtattccatggtgtatatgtgctacattttcttaatccagtctatcattgatggacatttgggttggttccaagtcttcgctattgtgaatagtgccacagtaaacatacatgtgcatgtgtctttattgtagaatgatttataatcctttgggtatatgcccagtagtgggatttgctgggtcaaatggtatttctagttctagatccttgaggaatcgccatactgtcttccacaatggttgaattaatttacactcccatcaacagtgtaaaagcgttcctatttttccacaacctctccagcatctgttgtttcctgactttttaatgatcaccgttctaactggcgtgagttggtatctcattgtggttttgatttgcatttctttaatgaccagtgatgatcagcattttttcaaatgtctgttggctgcataaatgtcttcttttgagaagtgtctgttcatatcctttgcccattttttgatggggttgtttgtttttttcttgtaaatttgtttaagttctttgtagattctggatattagccctttctcagatggatagattgcaaaaattttctcccatcctgtaggttgcctgctcaccctgatgatagtttcttttgctgtgcagaagctctttagtttaattagatctcctttgtcaattttggcttttgttgccattgcttttggtgttttagacatgaagtctttgcccatgcctatctcctgaatggtattgcccaggttttcttctaggatttttatggtcctaggtcttacgtttaagtatttgatccatcttgagttgatttttgtaaaaggtgtaaggaagggatccagtttcagttttctgcatatggctagccagttttcccaacaccatttattaaatagggaatcttttccccattgcttgtttgtgtcaggtttgtcaaagatcatatggttgtaactgtgtggtgttatttctgaggcctccattctgttccattggtctgcatatctgtttggccccagtaccatgctgttttggttactgtagccttgtagtatagtttcaagtcaggtagcatgatgcctccagctttgtccttcttgtccaggattgtcttggctatgagggctctttgttggttccatatgaagtttaaagtagtgttttccaattctgtgaagaaagtcagtggtagcttgatggagatggcattgaatctataaattactttgggcagtatggccattttcatgataatgattcttcctatccatgagcatggaatgtttttccatttgtttgtgtcctctcttatttccttgatcagtggtttatagttttccttgaagaggtccttcacatctcttataagttgtattcgtaggtattttattttcttagtagcaattgtgaatgggagttcactcatgatttggctctctgtttgtctgttattggtgtataggaatgcttgtgatttttgtacattgattttgtaccctgagactttactgaagttgcttatcagcttaaggaggttttgggctgagatgatggggttttctaaatatacaatcatgtcatctgcaaagagagacaatttgacttcctcttttcctatttgaataccctttattgctttctcttgcctgattgccctggccagaacttccaatactatgttgaataggagtggtgagagagggcatccctgtcttgtgccagttttcaaagggaatgcttccagtttttgcccattcagtatgatattggctgtgcgtttgtcataaatagctcttattattttgagatatgttccaccgatacatagtttattgagagtttttagcatgaaggggtgttgaattttatcgaaggccttttctgcatctattgagataatcatgtggtttttgtcattggttctgtttatgtgatggattatgtttattgatttgcatatgttgaaccagccttgcatcccagggatgaagccaacttgattgtggtagataagctttttgatgtgctgctggatttggtttgccagtgttttattgaggatttttgtatcgatgttcatcagggatattggcctgaaattttctttttttgttgtgtctctgtcaggttttggtatcaggatgatgctggcttcataaaatgagttagggaggattccctctttttctattgtttggaatagtttcagaaggaatggtaccagctcctctttgtgcctctggtagaatttgtctgtgaatccgtctggtcctgtactttttttggttggtaggctattaattactgcctcaatttcagaacttgttataggtctattcagggattcaacttcttcctggcttagacttgggagggtgtatgtgtccaggaatttatctatttcttctagattttctagtttatctgcatagacgtgtttatagtattctctgatggtagtttgtatttctgtgggatcagtggtgatatccccaatatcattttttattgcatctatttgattcttctctcttttcctctttattagtgtggctagaagtctatctattttgttgattttttcaaaaaaaccagctcctggattcaatgattttttgaaggtttttttgtgtctctatctccttcagttctgctctgatcttagttatttcctgtcttctgctagcttttgaatttgtttgctgttgcttctctaattctttaattttgatgttagggtgtcaattttcaatttttcttgctttctcttgtgggcatttagtgctgtaaatttccctctaaacactgctttaagtgtgtcccagaaattctggtacgctgtgtcttcattctcattggtttcaaagaacatctttatatctgccttcatttcattatttacccagtagtcattcaggagcaggttgttcagtttccatgtatttttgtggttttgagtgtgtttcttaatcctgagttctaatttgattgcactgtggtctgagagactgtttgttatgatttccattcttttgtatttgctgaggagtgttttacttcgaattatgtaatcagttttagaataagtgtaatgtggtgctgagaagaatgtataatctgttgatttggggtggagagttctgtagatctctattaggtctgcttggtccagagctgagttcaagtcctgaatatccttgttaattttctgtctcattaatctaatattgacagtggggtgttaaagtatcccactattattgtgtgggagtctacgtctctttgtatgtctctaagaacttgctttatgaatctgggtgctcctgtattgggtgcatatgtatttaggatagttagctcttcttgctgcatttttccctttaccattatgtgatgctcttctttgtctcttttggtctttgttggtttaaagtctgttttatcagagattaggattgcaactcttgcttttttttttgctttccatttgcttggtaaatattcctccatccctttattttgagcctatgtgtgtctttgcaagtgagatgagtctcctgaatacagcatactgatgggtcttgactctttatccaatttgccagtctgtgtcttttaattggggtatttagcccatttacatttaaggttaatattgttatgtgtgaatttgatcctgtcattatgatgctagctggttgttttgcccattagttaatgcagtttcttcatagtgtcaatgttctttacaatttggtatgtttttgcagtggctagtaccagttgttcctttccatgtttagtgcttctttcaggagctcttgtaaggcaggtctgatggtgacaaaatccctcagcattcggttgtctgtaaagaatttcatttctccttcacttatgaagctttaagaggtttaattgactcacagttctgcatggctgtcccataagtcccatgttctttcctcaggaaacctacagtcatagcagaaagggaaataggcacatcttacatggcagcaggcaagagagagtgtgtgaaggaggaactgtcaaacacttataaaaccatcagctctcataagaactcactatcaggagaacagcgtgggggaaaccatccccatgatccaatcacctcccactaggtccctcccttgacatgtgggcattatggggattacgattcaaggtgagatttgagtgggaacatagagccaaaccatatcagtatctaaaaggaaaaaccttcagtttttccacatttggttatgatatcagctgtgagcttttcctatatggtctttattgtgttaagttccttctgtatctatcttgctgaaagtttttattatgaatggatatctagttttgtcaaattctttttctgtattgatcgaaataatcatgtgtttttcatctttcattctgataatgtggtatatcacattgattgatttgcccatgttgaaccatccttgcatcctagggataaataccacttgttcatgatgaatgatccttttaatgtgctgttgaatttggttggctggtgttttgttgaggatttttgtatccgtgttcatcagggatattggcctgtagttttctttcttttcttttcattttctttttctttctttttttttttttttttttttgagacagagtcttgctctgtcacccaggctggagtgcagtggtggtatgatcttggctcactacaacctccacctcctggattcaagcgattctcctgcctcagcctcctgagtagctgggactactggaacatgccatcacacccagctaatttttgtatttttttagtagagatgagttttcaccttgttggccaggctggtctcgaattcctgacctcaagtgatttgcctgcttcagcctcccaaagtgttgggattacaggcttgagccaccacacctggcctggcctgtagttttcttttctagtgttgtttttgcctggatatggtatcagggtgatgttggctaataaattgtattttgaagtgttctctcttgtattttttggaagagtttaagaaatactggtattaatacttcgttgaatgtttgatggaattcatccatgaagccattggtcctgggcttttctttgttggaaggtttttgattactagatttaatatccctatttgttgttagtctgttaaggctttctatttctttgttattcagttttggtatgttatatgtttctaggaatttatccatttcctctaggttaaccaatttgttgacacttataatagtcccttatggttctgtctgtttctgtgacatcagttgtagtgtctcctctttcatttatattttatttatatgagtcttctctctttttttcgtagtctagataaggacttgtcaattttgtttattttttcaaaaaaatcaactcttagttttgtcagttatttccaattgtttttttattctcttttttatttatttctgctctagcatttattatctcctttgttctgctacctttgggcttagttttttttttcttctttttgtagttcctggaggtgataagttgggttgtttatttcatatgtttcttctttttaaatataggcatttattgctataaatttccctattagtatgcttttactgcatcctttaagttttggtatattatcaagattttggtttcttctgtgacccaatggtcgttcaagaatgtgttgtttagtttccacatatttgtgaattttcgtgttttcttattgttattgatttgtagtttcaatccattgtggtcagaaaatatacttggtatgatattaatcttcttaaatttattatgacttgttttgtgacctgaaaggtgatctgtcctgaagaatgttttgtgtgtgcttgataattctactgttgggtggaaagttctgtatatacattttaggtccattgggtctattttattcttcagttctgttttgtccttattgattttctgttgggatgatctattcattatagagagtggagtattgaagtcaactatattatattgttatctatttctccttccatgtctgtcaatgtttgctttatatatttaggtactttcgtgttgggtacatatatatttataattattacatcttcctgttcaagtgacccttttattatataatgaccttctatgtctcatgtcacagttttttacttaaagactattttttctcatacaagtatagccacccctgctctcttttggttacagtttgcatggcataactttctccaccccttcactttcagcctatgtatgtccttaaatcaaaagtgagtctgttatcaacaacatgtagttgggtcctgtttatttttgtttcttacttcccatctctgaattgttggctttttaaaaagcccattcagttactctgtgtcttttgactggggagtttagtcaatttacacttaaagtaattattgataggttaggactttctgttgccattctgttaatagttttctgttttgtagttttcttgttcctttcctctttttctttctttgtggtttgatgatttttgcttggatgtgttttgattcttttctctttatcttctgtatatctactgtgtgggggggcggtcgggggggttaccacagggatcaaattgaacactttatagttatggcagtctgttttaagctgacaacaccttcaatcacatacagaaactctatactttactcattccccccgccacaactttatgtaatcgacgtcatattttacttccttctatattgtgtttccattgacaaatttctgtcactatagttactattactatttttgtcttttaatttataaattaatattaatagtgatttataacaatcattatagtgttacaatagtctatgtttctctttatatttacctttagcagtgaaaggattcatatgcttttgtgttactgttttttttttatttcaacttgaagaactattagcacttcttataaggcaggtctcatggtgacaaaccccctcagtttttgtttgagaaaggctttatctttgtgttcattcttaaaggacagtttttccagataaagtattgttgattggatttttttctctcagtactttgaatatatcatcccactctttcctgacctgcaaggtttctgctgagatatccactcatagtcttatggagctcccctataggtgacaattcactttcttcttactaccccaaaattctcttttgtctttgttgaaaatttaattataatgcatctcactgtagacttctgtgggtttaatgtatttggttatctttgggcttaatgaatccagatggcacttcccctccatagatttggggagttctcacctattatttctttaaataagtttcctttctctctctcttctccttttaagatttctataatgcatctatcattttgcttgatgatgtcccataagtcctctgttcttccttcactctttctcattgttctttttattccgctaactagataatttcaaatgacttgtcttcaagtttacaaattctttcttctgaatgattgagtctgctattaaagatcgctattaaattttttagttcagtcattcttcagctatattcagcaatattctttagctacaggatttttatttggttcttttttatggtttttatttctttattaaacttctaatgttgttcatgtattgttttcctcattttgttagtcgtcttcctgtatcctcttgtagctaattgagcttctttaaatgattattttgaattctttgtcaaaaatttcatgaatctccatttcttcagggttggttactggagctttattagttccctttggtgatgtcatatttgcctgattcttcatgatccacatagcctagcattggtatctgtgcattggagtgagctgacacctcttctggtctgaagttgggtactcagacaatgggcccattaccagggctttggataggtgtagctctcactgggtccttgagtgggcaggactgcctgcagaccatgatgcagtgggcctggagctgggtcaaagggctgcttcagggtccccacttgggcccacagtcagtgggcctgttatgggggcacaggtaagtgtggattcaggcaggactgtctccagaacatggtacagcaagactggagttggctcacagggttacttctgagtccacagtcaggtctagttggtgggcctgcttccagaggtggactggcatgactcccacctgtttcctaagtaggcaaaacttccccaagaccatggtagtgtggtactgaagctgctttaggtacagggctgcttcagagtccacagttgggagccctgttactggggttgccaatgggagttgctcctcccagattcctgggcagatagggatagtggtaggaccacatacaaacaactctggagctaagtccccagggtggtgggctgcttctgggtccacaaccagaactacagttgacaggcctgccgctagaatgtgggcctgccttattaaagtattcatctttgttcttgagctctaccagggtttctcaacctcctacctgaatcccaaggctcccacaaagacacttttgtccatagatcattgtcaaattattgttcctgtgggggaacaagagctagggacctcctatcccatcaactcactgataccgttctcctgatgctgcattttgaattgccctcaggtgatgctgctactcctggtctgtggaccatgctggagtagcagagcccaaatggcttcctcaacttttatgagccttttacaggaactcaaagtagaaaataacttcacttgccccagacctaataatttcctttgttcccacttcttcttggtgctttcctcctttgtgtctaccatcgtaacatccatctaaccatagttgtcttatgtagatgttggatgctgttgagaaacgcacaaagcaaattagaaggaagatatgattgacagaaattgctttttactctgtattcactttccatgtatttgtgctaatctctccatacaggtcttctttggcaatgtggattcatctgggataaaacacaatatttttaaccctccaattattgctcgatacatccgtttgcacccaactcattatagcattcgcagcactcttcgcatggagttgatgggctgtgatttaaatagtaagtgccaagtcatcccatatccttcttccctcaaccatgggtagggtgactaactgttctagttatcctgagactgggggaggggttcccggtatcaggacacaaaattgtcagtgctaaaaccagcatagtcctgggcaaacccagaaataccattcaacccagcagtcccatcactgggtatataatcaaaggaatataaatcattctgtcataaagacacatgcacgcatatgttcatttcagcactattcacaatagcaaaggcatggagtcaacctaaatgcccatcaacaacagattggataaagaaaatgtggtacatacataccatggaatactatgcagccataaaaaagaatgagatcatgtccttttcagcaacatagatgcagctagaggccattatcataaatgaactaatgcaggaacagaaaaccaaatatcatgtgttctcataagtgggagctaaacattaaatgcacatggacacaatgatggacactcaggaggggagaggttgggaggggggtgtgggttagaaggttatgtattgtgtactgcactcactacctgagtgaggggatcattcatacaccaagcctcagtgacatgcaatttacccatgcaacaaacctacccatgtacccctagaatctaaaataaaagtagaagaagaaaagaaacaaagaaaattaaagagtcacacaaagtgggaagagctggctggaaaacagatagcaataacagaattggccgggcgtggtggctcacacctgtaatcccagcactttgtgaggccaaggcgggtggatcacgaggtcaggagatcaagaccatcctggctaacatagtgaaaccccaactctactaaaaatacaaaaaattagccgggtgtggtggtgtgcgcctgtagtcccagctactcgggaggctgaggcaagagaatcgcttgaactcgggaggcagaggttgcagtgagctgagatcatgccactacactccagcctgggtgacaaagcgagactccatctcaaaaaaacaaaaacaaaacaaaacaaaacaaaaaaccaataacagaatctgtgcaaaagttaaaacctgagaaatgatattatgatgacagtagccctagaatatcagtggaagctgctcagtataactgaggctgaagcatgtccttgtgataaccttcttttttcttttctttgaggttgcagcatgccattgggaatggagagtaaagcaatatcagatgcacagattactgcttcatcctactttaccaatatgtttgccacctggtctccttcaaaagctcgacttcacctccaagggaggagtaatgcctggagacctcaggtaagaggcaacagatttactgtttaactgactcagagcagtggttggggaaaaaatcggggaaggccttgactgtttcttctgaggtatttctgtcaactgttagttctaaaaagtgtgtcaaggaagtttggttatgggcagacaaccacacaggcatttgggggaaatgatctctaattgaacctcctggaagaagaatctctatatctagtactgagctaatatctgtcaaagaattgtagaagctaaagtccattttacagataaatatcaacaattagctttctttccaggtttctcattacatcaatgaaaagtaaacatttactgcacatcttagtatccctaggatgagcctagggatacaaaggtgaattgtgaaaaattttggccctgaagttgcttagagttgaataagagagactgactagccaatagaaagtggaggctgggtgcggtggctcatgcctgtaatcccagcactttgggaggctgaggcgggccgatcacaaggtcaggagttctagatcactcttttgctgaggcaggataatcgcatgaacctgggaggcggaggttgcagtgagctgagatcatgctattgcactccagcccaggcaacagtgcctgactctgtctgaaagaggcagagagagagagagagagaaagaaaggaaagaaggaaggaagaaaaagaaagaaaggaaggaaggaaggaggccgggcagagtggctcacgcctgtaatcctagcactttgggaggcctaggtggcagatcacctgaagtcaggagttcaagaccagcctggccaacctggtgaaacctcatctctactaaaaatataaaattatctggacatggtggtgggcacctgtaaccacagctactcgggaagctgaggcaggagaatcggttgaactcgggaggcagaggttcagtgagctgagatcatgccattgcactacagcctgggtgacagagcaagactccgtctcaaaaaagaaagtagagtgagaagtgctgtggtatggttaagagggatttgggaatttctgggagtaaatggtgaccaagaggctactagtccaactctattgccctcaggtgaataatccaaaagagtggctgcaagtggacttccagaagacaatgaaagtcacaggagtaactactcagggagtaaaatctctgcttaccagcatgtatgtgaaggagttcctcatctccagcagtcaagatggccatcagtggactctcttttttcagaatggcaaagtaaaggtaagctggtctccttggaaagaaagaaagaaagaaaaaaaataccacctctcctagagcttaacataacataaaaaggttgatatatgaccaaattttcagagcaaaatttattaagtacctatggtagcaagacattgtaaaaggcattctgagagaacacagtgactttaagaaaaaggtaaaatactgagaaaagggcagagtagatccaagagttaattctcctcatcagcaccttgattcccaagcctttttgacctttaagtttagtggtccaggaagtcttcattcttaatctgggtttgctggataattcaacaaattgtcctgattaaaagacatgacataaagtcttatcaccccatgagtaatgggggaaggaatagttcctctctttggtattttttatattcttttttcaccaagaattaaccatgatgtggtccttaccaatctctctaatacagtctcttgccacttggctctttaagctccatccatactaagaaattctcaggtcactaaatacagccattatatctcataccaggcttttaaatagatactatttcttctacctggaacatttttctagctaccctctactgccactttcacctgactcattcgttaagtctcaggtaaacatcatgtccaagaagaattcccttatccatcaaggctggatgaaagacttcaccaaactggcagtttggtgaactgaagtctagacattggatattctagaagaaaaattcccatttaaaaaaggttatatctctgattagtgccacaacatgatgaactttcaaaatatgctaagtgaaggccgggcgcggtggctgatgcctgtaatcccagcactttgggaggctgaggcaggcagatcacgaggtcggtaaattgagaccatcctggctaacacagtgaaaccccatctctactaaaaatacaaaaaattagccaagcgtggtggcgggtgcctgtagtcccagctactcgggaggctgagacaggagaatggcatgaacccgggaggcagagcttgcagtgagccgagatcgcaccactgcattccaacctgggcaacagagtgagactccatctcaaaaaaaaaaaaaaaagaaaatacgctaagtgaataggccagacataaaaggatagatattatatgattctacttatatgagtgtgttagtcagggatatccaaagaaatagaaccaataggagattctgtctgtctgtctctctctctctgtctctctggatgagctaaactgttttagttcaagactgaaagcaggaaaaagctgatgttccagtccaaaggcagacaggcagcaagaatactttcttacttggggaagactcagtctttttgttctattcaggccttcaactaattggatgatgcctcccacattagggagagcaatctgctttactcagtctactgacttcgatgttaatcccattcaaaaacaccttcacagaaataaccagaataatgtttgagtaaatatctgggcaccttatgaccaagtaaagtagatacataaaattaaccatgacaagtccaccccttgtcaatgtagcacccatcatacacatctcctttatctctaagtagagacaaaaatgaggtcataattccacctaacatgatataacaaaacttggctggtattgataactaccttcttctactacccattctgtattgactttgccttcagcaagcatctcagctgattgtggttctttacctgatgaggtgacccaaacctttattcctgaagagcctgggccactagtagtcctgcatggattgggttgctgtagtttcccattgaccagaatcatagggcctggtaatactaagagacactctaagggatctattgtattccagacacactcttccatacctccattgtgaagcagtagttcagtttccttccaggaaggacaaaacgctgccccttccatgatgaacatattccaatgtaatcaacctgctgccagatagctggctgatcatcctgggaaatactgccatactgaggactctgtgtttgtctctactgctggcagattgggcacttagcagtggccatagccaggtcagccttgttgaatagaagtccatgttgctgagcccatgcatagcctctatccctgccaccatggctactttgttcatgagcccatcaggcagtgacataggtggctgagtaaaaaggatgactggtatccacagaacaggtcatcatatctactttttttttgagatggagtcttgctctgttgcccaggctggagtgcagtggcacaatctcagctcactgcaacctctgcctcccaggttcaagcatttctcgtgcctcagcctcccgagtagctgggactacaggcacgcatcaccatgcctggctaatttttgtatttttagtagagacagggtttcaccatgttggccaggctggtcttgaactcctgacttcaggtgatcctcccgccttggcttcccaaagtgctgggattacaggcgtgagccactgcacccggcccatcatatttacttgattattgaaatccttatctgctgaggtcacccttcgttgagcactcacatgggacataaatatattcacatcctttgcccattcagagagatctgtccacatacctcttccccaaatttctttgtcacctgttttctaatcatgttccttccaagtccctatctggacaaagcactgactacagcccattacttgacatataattgcacacctggccatttctccttctaagcaaagtccacaaccaggtacactgcctaaaattctgcccactgtccttcatgggtatctcagatcgggactgtccacttttgtgtagtacctgcatatcgtgcagaaccgtctgtaaaccaggcccaagactcctcttcctctgtaaactgatcatagggaactcccaatggggccataagtgcaggctgggagagagaaggcagggtagcagaaacaggcaccatggacatttgggctacttcttcatgtaatttacatgtgttttcagtacctgctcagacatgatcatgtatataccacttccatttgatgatggagtgccattgttcatacccaactttatggcttggtgggtcagataacacctagttcatgatgggcagttcaggtcacatggcaacttggtggtctgtggctaagcattcagtatctactaaggcccagtagtaggccaagagctatctcacaaaaggagaacagttattcacagaggattacaggaggatttctcactacagtagcccctgctccataggtcagggaaccaatgtgaagatcctgctagctgctcaatatatctgttccaattacgcattccaggactggggaaataaccacaagatagtctcacagatcctctgcatccactttgagatggacttgagctaaaattccattgatcatttgaccctccataagcccatactctgactggtggaccacagtgacattttgggtctcctgaaattagtgccagttcagagccattgtccagtagtccctgaaaggtctgattaattatttttcttcagtgcacatttattctgatagaaaggccatatgtccctttggggaaggctgagagaaagagtggcagtattcttggcagtgtaccagagtccttcctcaaggagactgagcctccccttcattcaaggagtgctgggtctgtaaacctgctcaagtctgggaattgattgagaggccgtgactctgtttttattattcaggttagacttttgttcacttgacctagaacttttccacttatgcagttcaagaatttggtaggcattctatctatatcacatctaggaacactataatctactagccaacaccataggtctgtgcaagtcatactattctaactgctgctttgactctgctgtcccttatggtaaccacacttaccttgcctttggcagttgagtgctgcccattggccccttccaccccaggatccaattattcccattgtatttaggttttctaattcagtgactgcaggtcctgctgtaaggtgtcacctacagagaagagtgatcacagagcccttcaaggatgctgaggttcccctcacaaatttattcctcaaagtaatagtgagatctgtgtcttctgaactctcccagtgttggtgagtatgtcttaaatgacaaattcactctagcatttcaatctcctttcttctacattaaaccagggcaagtctgaaatttctagtttgctcactgtgggccatcttttggtctgtgtttcagccaaccaattaaactgttagaggccttcctaattccctgagatgcaacattaagtccagaatctctgcttagtgggcccatgtcaataaatttggcctaatccaactttacgtgccttccaccgttatctcacatccttagtacccattcctatacatattctctggattcctgcttgtgtaaattagaaaactcaagtcatgattttggagtgtagtgcaccttgtcatgggtcaccttcatacctcacctcgcctgctgggacttgagtgtagttatagatctaataacaaagaggggtggtagggtgggtcctgaaggaatcagcattatcttgcatggcagttgcctcaggggaagccattacagtttcctcaggcagtgcagggttaatccacttagactggagtagagatactgccaccacagggctggagagaaaactttcactgacaaagaagactcatcaatatttaggagctcaatgtccccagcttaatcagggtcttccacacatacctaatccaacttgtagtgccccattctttcccaatcactgcccttgctttaacagtagacaccctgcaaagctgggagtttggcttgctttgtaattcagttagtcacaggatgagatttggcatttgattttcagcaatctcagctctgtggctacagtagataagggtctccttcagggcatacatagaatctgtcaagtcatttatgcagctcttgagctgggaattcaaattcctgagctcctccttttctttcatcactttttccagcaacattaggagcaaccgactaatcccatcatattcattagtttgacaaatatgttcacaagtgtcaatatacatagtcaccaagacccttgcttcttaaaagtagttgattaggagtatccaatggagatattttgcatatacatattttttgagatggagtctcgctctgtcacccaggccggagtgcagtggcatgatctcagctcactgcaacctccatctcccaggttcaagcgattatcatgcctcagcctcccgagtagttgggattacaggcacctgcctaatttttgtgtttttagtagagacagggtttcatcatgttggccaggctggtctcgaactcctgacctcaggtgatccatccacctcggcctcccaaagtgctgggattacaggcgtgagccaccgcgcccagcctggcctacatatttctattgccagatcatgccatggacaatttttactactgaaaatagtcattagtgtctttaaatttcatcaggttacagaaccaattccagaaatccaataacaaatttataaaatttatccttaaaattctgttcctttagaatcactcttggtgtgaaaatctgtattagtcatggttcccaaagaaacaaaaccagaaccaagaggagatacatacacacacacacacacacacacacacacaaggaattagctcatgtgattatggagtctgccaagtctcaagatctgcagggtgagttggcagcctagagaccccagagagctgattcgtagttccagttcaaagaccagcaggctacagacccagaaagagttaaaatgttttagttcgagcccaaaggcaggaaaaaaactgaagtcccagtttaaaggtagtcaaatagaaggaactgtctcttactaagaggacagtaagcctttttgttatatttaggccttcaactgattggataagttctacccacactggggagaacaatctgctttacttagtctaccaattcaaatgttaatctcaccaaaaaacactctcacagacacacataaaataaagtttaatcaaatatatgggcaccccatggcccagtcaagttgacacataaaattaaccaccataatgaggtatctagagcaggcaaattcataaagacagaaagtagaaaagaggttaccagggtcttggaatggggaagaaatggagagttatttttaatgagtacagagtttctgtttggggtgatgaaaaagttctggaaatggatagtggtaatgggtgcacaatattgtgagtatacttaataccactaaattgtacacttaaaaatgattaaaatggtaaattttatgtatattgtacaacaataaaaaaggctatatcactgacaatgcattgttgtatttagcaaagaaaggggaatctccagcctccccatcaacaaaaacccccacaaacttctattttaaaataatgagctgaaatcatagcggagaggtgaataatgagcaaatataaaaaggaagacctttcctcagacagaatgcccatattaatgttgttactggaagactaagccttgagcaaaatgcaaggagaactcagtgtgagaattctgcattgtcatgaatcccagaaggaagctagagaagttgcagataaatattatcctctggcacctggaagaaccattctcaacctactctagaaaaaaagcacctccagtttaggcctccaggattcctacatattaaaattataagatcacagacatagatcagcaaacatgcaagacaacaagacaacttgagtacaagtgaacagaaacaatcaattcagatttaaaacttgaagaacaccagatattgacattatcggatacataatatgaaataattatgtataaaatctttaaagtaataacatatggaaacatgaaaataaaagacaaattatccaacattattaggcagttgaaaaaaaccattgcaggttacaaagtcaacatgcaaaaatcaattgtatttttatatactaacaattacaaatatgaaaaggaaaacagaaaagtctatttacaatagcatcaaagataatacaatatttaggaataaatttaacgaaggaggtgcaagtcttgtccactaaaaacaaaaaaacccagttgaaagaaactaaagaactgtctggtctgaagacagcaaatatggaaaattagcaactagaaaaaaattaaaaattaaaaattaaaagagaaattaaataactaaataaatgaaaaggcatcctggatttatggatttgaagacataatattcttaagataagaatattaccacaaaccatttgcagattcaaagcaagcattctgggtttttttgtttgtttgtttgttttttgatttgagacggagtctcactctgtcgctcaggctgcagtgtggtggtgcaatctccactcaccataacctctgcttcctgggctcaagcgattctccggcctcaaagcattctctatcagaatcccaaagacatttttttttttgaggaatagaaaaatctatcctaaaattcagatggaatttcaagggaccctgaatagccaaaacaatcttgaaaaagaacaacgttggaggagtcatacttcccaatttcagaacttactacaaagctacaagaatcaaaacagggcagtacttacataaatatagacacatagatcaatggaatagaattgagagtccagaaataagcctatacatctatggtcaattgattttcaataaaagtgccaagaccattttgtgggaaaagaatagtctcttcaacaaatggtgctgggacaattggatatccacatgcaaaagaatgaagttggatctttaccatatacaaaatttaactcaaggctggatgtggtggctcacatctgtaatcccagcactttgggaggctaaggctggtggatcacttgagctcaggagtttgagaccagcctgggcaacacagtgagactctgtatctacaaaacaagaaaaaaaaattagctggcatgatggtacacacctgtagtcccagctactagggaagctgggataggaggatcgcttgagcccaggaggtggaggctgcagtgagccatgatcgcaccactgcactccagcctgggtgtcagagcaagaccctgtctgtaaaaaatcatttaactaaaaatgtatcaaaaaactaaatataaaagctaaaaccataaaactgtaagaaaaaacaaagaggtaaattgttatgatactggatttggcaatggtttcttagatgtgacaccacaatcacaagcaacaactctataaaaatatatatagtaggcatctttaaagttaaaagcttttgtacatcaaagaacactatcaagaaagtaaaaagatgatctacagtataggagaaaaaaattgcaaatcatatatctgataaagggcctagtatcccagaatataaaaagaactcttacaactcaacaacagaaagacaaccaaattttaaaatgggtaaaggacttcaatggaacttctccaaagaagatatacaaggatccaacaaactcatgaaaagatagacaacatcattagttattagggaaatgcaaatcaaaaccacaatgagatagcatttcaaacctgctaggatggctaaattaaaaaaaaaacaaaaacaaaatgtcaagcgggaaaataacaagtgttagcaagaatataaagaaattggaaccttccttgatgatgagaatgtgaaatagggcagccactgtagaaaatattttggcagttcctcagtaaggaaaacatagaattaacatagacccagcaattctactcctgggtgtggacccaaaagaattaaaagcaggcactctaacaaaaactaatatacaaatgcatatagaagtactattcataatagcaaacaggtgaaaacaattcaaatgttcatcaagtgatgaacagataaacaaaatgtggtctatccatatatggactattatttattcataaaaaatcaaagtactgatccatgctaaaacatggatgctccttgaaagcattatgctaagtgaaagcagccaggcacaaaaggccacattccacttatatgaaatacccagaatagcaaatccatagagacagaaaacagattagtggttgccagaagctggcagaaggagtgaatgtggagtggcttcttaataagtattgaatctccttttggggttatagaaatgttctggaactagatagtggtgatggctatataacattgtgaatgtactaaatggcactgaacttcacactttaaaattgttaaaatggtaaattttatgtttgcgaattttgcaatagataagtcagaagacatgtacattaccataatgagtaacaaactgacagctgatttctaaataatagcaaatatcagaaaataatgaatgatgtcttcacaatgctaaaataaacaatgtgaacccctctctcaaaaagaaaacctaatgaaaatatcttttatgcgttaaagcaaaagaggaaattaggacacagacaggcacagagggacgaccacatgaagatatagaaagaggacagacacctacaagccaacgagagaggccttacaagaaaccaacccttagccaggtgtggtagtgtgcacttgtagttcttgttacaagggtgcagtgagctagggttgtgccactgcactccagcctgggaaacagaacaagaccctgcctctaaaaaaaaaaataaagagaaggagaagaagaagaaaaggaaaagaaaaaaaaaaagaaccaagcctgctggccaggcgtggtaactcatgcctgtaatcccagcactttggaaggctgaggcaggaagatcatctgaggtcaggagttcaagaccagcctgcccaacatggtgaaacccccctctactaaaaatacaaaaattagctggacatgctggcatgcgcttgtaatcccagctactcgggaggctgaggcacaagaattgcttgagcccaggaggcagaagttgcagtgagcccagatcgcgccatcacattccagcctggactacagagggagactccatctcaaaaaacaaacagacaaaaaaaaaatacacacacacacacacacacacacacacacacacacaaaacaagcctgcctaccccttgatcttggacttgtagcctccagaactgtgagaaaataaatttctattgtttaagccaggtgtgcgtgtgaaaatttagaacatatgacaacagcaaaaaagtcagcatgtggataaatagaataaaggattctaaaatccatgtattatctaggaggtaaagatgttaatattaaaccttcataatttgattaatgttgtagtttataggatagccagtaagtaatagaaatacacacaatgtaagactcccaaaatggtagaagaaaaaatatgaaaggataaaatatactcaacaaacctaaatgaaagcaagcaaagagagataaagaaacataaaacaggtaggaaaaatagcaagataagatggtatatttaaattgaaatataacagtaatcatatgtaatatgaatggaccaaatatttcagttaaaagacaaagattgtcagattgataaaaaagcaaaagtagctgggtgtgatggctcacacctgtagtcccagctacttaggatgctgatgtgggaggatcacttgagcccaggaggttcagcctggacaagatagtgagacttgtctctttaaaaaaaaaaaaaaaaagcaaaagtaaattgtgtgcattttatgagtcatatctaaaacattagatacagaaaagtagcaagacaaaaatgggaaaagaaattatgcaaatatctaaaagatatcgattacagctctattgatagcagaaaaatagactttaaagcaagaaagtattgctgaagattaagaatgtgatttcatggctggacgcggtggctcacacctgtaatcccagcactttgggaggccgaggcaggtggatcatgaggtcaggaaattgagaccatcctggctaacatggtgaaaccccgtctctactaaaaaaaaatacaaaaattagccgggtgtggtggcggacacctgtagtcccagttactcaggagggtgaggcaggagaatggcgtgaactcgggaggctagattttaacacatctctcgtcaattgatggaacaatgtatagaaatagaacaattaacatgattcacaagtttgatcttatagacatatttagaaaatagcaccttgaaattgcaaaattacaagggtggttccaacatggccgaataggaacagctccagtctacagctcccagcatgaatgacacagaagacaggtgatttctgcatttccaactaaggtaccaggttaatctcactgtggcttgtcggacagtgggtgcaggacagtgggtgcagcccaccgagcatgagccgaagcagggtaaggtatcacctcacccgggaagcacaaggggtcagggaattccctttcctagccaagggaagctgtgacagatggcacctggaaaattgggtcactcccatcctaatactgcgcttttccaatggtcttagcaaacggcacaccaggagattatatcctgcacctggctcagagggtcccacacccacggagcctcgctcattgctagcacagcagtctgagatcaaactgcaaggtggctgcaaggcagggagaggggcacccgccattgctgaggcttgagtaggtaaacaaagcggccaggaagctcgaacttggtggagcccaccgcagctcaaggaggcctgcctgcctctgtacgctccacctttgggggcagggcaaagacaaacaaaaagacagcagtaacctctgcagacttaaatgtccctgtctgacagctttgaagagagtagtggttctcccagcacagagtttgtgatctgagaacggacagactgcctcctcaagtgggtccctgacccccgagtagcctaactgggaggcacgccccagtaggggcagactgacacctcacacagctgggtacccctctgagaccaagcttccagaggaacgatcaggcagcaacatttgctgttcagcaatattcgctcttctgcagcctctgctgctgatacccaggcaaacagggtctggagcggacctccagcaaactccaacagacctgcagctgagggtcctgtctgttagaaggaaaactaacaaacagaaaggacatccacaccaaaaccccatctgtacatcaccatcatcaaagaccaaaggtagataaaaccacaaagatggggaaaaaacagagcagaaaagctgaaaattctaaaaatcagagtacctctcctactccaaaggaacgcagctcctcgccagcaacggaacaaagctggacagaaaatgactttgacgagttgagagaagaaggcttcagatgatcaaacttctctgagctaaaggaggaagttcgaacccatcacaaagaagctaaaaaccttgaaaaaaaaggttagatgaatggctaactagaataaccagtatagagaagtccttaaatgacctgatggagctgaaaaccatggcacgagaactatgtgacgaatgcataagctttagtagccgatgcgatcaactggaagaaagggtatcagtgattgaagatcaaatgaatgaaatgaagcgagaagagaagtttagagaaaaaagaataaaaagaaatgaacaaagcctccaagaaatatgggactatgtgaaaagaccaaatctatgtctgattagtgtacctgaaagtgacagggagaatggaaccaagttggaaaacactctgcaggatattatccaggagaacttccccaacctagcaaggcaggccaacattcaaattcaggaaatacagagaacgccacaaagatactccttgagaagagcaactccaagacacataactgtcagattcaccaaagttgaaatgaaggaaaaaatgttaagggcagccagacagaaagttcgggttacccgcaaagggaagcccatcagactaacagctgatctcttggcagaaactctacaagccagaagagagtgggggccaatattcaacattcttaaagaaaagaattttcaacccagaatttcatatccagccaaactaagcttcataagtgaaggagaaataaaatcctttacagacaagcaaatgctgagagattttgtcaccaccaggcttgccctacaagagctcctgaaggaagcactaaacatagaaaggaacaaccggtaccagccactgcaaaaacatcccaaattgtaaagaccatcgatgctaggaagaaactgcatcaactaatgagcaaaataaccagctaacatcataatgacaggatcaaattcacacataacaatattaaccttaaacataaatgggctaactgctccaattaaaagacacagactggcacattggataaagagtcaagacccatcagtgtgctgtattcaggagacccatctcacatgcagagactcacataggctcgaaataaagggatggaggaagatctaccaagcaaatggaaaacaaaaaaagaaaagcaggggttgcaatcctagtctctgataaaacagactttaaaccaacaaagatcaaaagagacaaggccattacataatggtaaagggatcaattcaacaagaagagctaactatccaaaatatatatgcacccaatacaggagcacccagattcataaagcaagtccttagagacctacaaagagacttagactcccacacaataataatgggagactttaacaccccactgtcaacattagacagttcaacgagacagaaagttaacaaggatatccaggaattgaactcagctctgcagcaagcggacctaatagacatctacagaactctccatcccaaatcaacagaatatacattcttctcagcaccacatccaaaactgaccacatagttggaagtaaagcactcctcagcaaatgtaaaagaacagaaattataacaaactgtctctcaggccacagtgcaatcaaactagaactcaggattaagaaactcattcaaaaccgctcaactacatggaaactgaacaacctgctcctgaatgactactgggtacatagcgaaatgaaggcagaaataaagatgttctttgaaaccaatgagaacaaagacacaatataccagaatctctgggacacatttaaagcagtgtgtagaggaaaatttatagcactaagtgcccacaggagaaagcaggaaagatcaaaaattgacaccctaacatcacaatttaaagaactagagaagcaagagcaaacacattcaaaagctggcagaaggcaagaaataactaagatcagagcagaactgaaggagatagagacacaaaaaaccctttaaaaaatcaatgaatccaggaactggttttttgaaaagatcaacaaaattgatagaacactagcaagactaataaagaagaaaagagagaagaatcaaatagacgcaataaaaaatgataaaggggatatcaccaccaatcccacagaaatacaaactaccatcagagaatactataaacacctctatgtaaataaactagaaaatctagaagaaatggataaattcctggacacatacaccctcccaagactaaaccaggaagaagttgaatccctgaatagaccaataacaggctctgaaattgaggcaataattaatagcttaccaaccaaaaaaagtccaggaccagacggattcacactcaaattctaccagaactacaaggaggagctggtaccattccttctgaaactattccaatcaatagaaaaagatggaatcctccctaactcattttatgaggccagcatcatcctgataccaaagcctggcagagaaacaacaaaaaaagagaattttagaccaatatccctgatgaacattgatgcaaaaatcctcaataaaatactggcaaaccaaatccagcagcacatcaaaaagcttatccaccatgatcaagtgggcttcatctctgggatgcaaggctggttcaacatacgaaaatcaataaacgtaatccagcatataaacagaaccaaagacaaaaaccacatgattatctcaatagatgcagaaaaggcctttgacaaaattcaacaacacttcatgctaaaaactctcaataaattaggtattgatgggacgtatctcaaaataataagagctatttatgacaaacccacagccaatatcatactgaatgggcaaaaactggaagcattccctttgaaaactggcacaagacagggatgccctctctcaccactcctattcaacatagtgttggaagttctggccagggcaatcaggcaggagaaagaaataaagggtattcaattaggaaaagaggaagtcaaattgtccctgttcgcagacgacatgattgtatatctagaaaacaccattgtctcagcccaaaatctccttatgctgataagcaacttcagcaaagtctcaggatacaaaatcaatgtgcaaaaatcacaagcattcttatacaccaacaacagacaaacagagagccaaatcatgagtgaactcccattcacaattgcttcaaagagaataaaatacctaggaatccaacttacaagggatatgaaggacctcttcaaggagaactacaaaccactgctcaatgaaataaaaggggatacaaacaaatggaagaacattccatgctcatgggtaggaagaatcaatattgtgaaaatggccatactgcccaaggtattttatagattcaatgccatccccatcatgctaccaatgactttctttacagaattctaaaaaactattttaaagttcatttggaaccaaaaaagagcccgcattgccaagtcaatcctaagccaaaagaacaaagctggaggcatcacgctacctgacttcaaactatactacacggctacagtaaccaaaacagcatggtactggtaccaaaacagagatatagaccaatggaacagaacagagccctcagaagtaataccacacatctacaaccatctgatctttgacaaacctgacaaaaacaagaaatggggaaaggattccctattgaataaatggtgctgggaaaactggctagccatatgtagaaagctgaaactggatcccttccttacaccttatacaaaaattaattcaagatggattaaagacttaaatgttagacctaaaaccataaaaaccctagaagaaaacctaggcaataccattcaggacataggcatgggcaagaacttcatgtctaaaacaccaaaagcaatggcaacaaaagccaaaattgacaaatgggatctaatgaaactaaagagcttccgcacagcaaaagaaactaccatcccagtgaacaggcgagctacaaattgggagaaaatgtttgcaatctattcatctgacaaagggctaatatccagaatctacgaagaactcaaacaaacttacaagaaaaaaagaccccatcaaaaagtgggtgaaggatataaacagacacttctcaaaagaagacatttatgcagccaacagatacatgaaaaaatgctcatcatcactggccatcagagaaatgcaaatcaaaaccacagtgagataccatctcacaccagttagaatggcgatcattaaaaagtcaggaaacaacaggtgctggagaggatgtggagaaataggaacgcttttacactgttggtgggactgtaaactagttcaacaattgtggaagacagtgtggcgattcctcaaggatctagaactagaaataccatttgacccagccatcccattactgggtatgtacccaaaggattataaatcatgctgctataaagacacatgcacacgtatgtttattgcggcactattcacaatagcaaagacttggaaccaacccaaatgtccatcaatgatagactggattaagaaaatgtggcacatatacaccatggaatactatgcagccataaaaaggatctgttcatgtcctttgtagggacatggatgaagctggaaaccatcattctcaaaaactatcacaaggacaaaaaaccaaacaccgcatgttctcactcgtaggtgggaattgaacaataagaacacttggacacaggtaggggaacatcacacaccggggcctgtcatggggtgggtggacaggggagggatagcattaggagatatacctaatgtaaatgacgagttaatgggtgcagcacaccaacatggcacatgtatacatatgtaacaaacctgcacgttgtgcacatgtaccctagaacttacagtataataaaaaaaaagaaattgcaaaattacacattctttgtaagcacacaaaggaaacatgttagaattttccattttaagctacaaataagctacaaataaagtagtctcaaatttcagataatataaaacatgttttctggtcacaatacaattaaagttgatataaataagaaagataactataaaatcttcctatgttagaatcaagaactatacttttaaacccatgtgtcaaataagaaatcataaattagaaaatattttaaactgaatgataacaaggcatgacatattaaaatgtgggaatcagctaaagcaatatttagaaagaaatgtatagcgttaaaaacatatattggaagagaagaaagcctgacaattaatgagctaaggtatgtctcaagaagctagtgaaacagcaaaataaaccaaaaggaagtagaagcaaggaaataataaagatatgaagtaaatgaagtaaaaaagaaacatacaatagagagaataaagaaaaccaaaagttggttccttgaaaattgacaaacttctggcaagagcaatcaagatgaaaagaaggcacaaataatatcagaaactttaaaaaactggacatcaataaagatcccacaaaaatttctgccaatataaaaatataaaaaatgaggatacttattaatattaaatgttctttcttgttgtatttaccagggattaatccattttacctaattttccaaacttagtgttaaaaggttattaatttaaaaaatccagatccagatggctacactaactatattctaccaatttttcaaaggagaaataatattaaccttgcaaaaattctttcagaaaatggaaaaagatggaatgttattcaattatcttatgataatagcataaccttgacaaccaaaccgaacaagaacaatattagaaaggaagataataggcccgttttattcataaacataaatcccaaacaaaatattagcaatatggatccaaattggatttatgctaggaatgcaagtttggcttatacattagaaaactgatataatttatcacagtgacagactgaaggattatacatattggctgtcctaagcagtgcaataagatgagaaaaagaaggaaaatatgtaaggattgaatatgatgaaacaaactcattgtatgtggaagatatgatggcatagatagaaaatccaaaggaatttatatataaattattagaatttttaaaatttttcaagcttgctgaaaacaaaataaataccaaaattaattgtatttctgtatacctgaaacagttggaaaaatagttttaaatagcatttaaaaattccaagcaggagttgcacattcctgtcagataatggcagctgcctaaatctctccacagtcttcaaaaaccatacatacacatacacacacaattttaaattatgactaaaaccacccataacccatctatagaataaccagaagacaaaaagtactataagtttatatttacaagtagaaaataaatatataaatctagccaaccttgctccagagagaaaccctgtctcaaaaaaaaaaaaaaaaaaaaaaagaagaaagcaaatgttggaaattaactgtcctataaaaacaaaagtgaattactaaatcacaagacccacaaacctctttggtcacatctattaaataaattacacttccatttatcaacagtagagggtactcctggctaagaaacctagtaagccacccagccctcatgtctgcctgcataaatcacctcttattgctgaaacaagaaaatgtaaggaatttctaaatgaacagaaaatagcatatgaagcagatggtattaatgttcttgagtttttattccctctttccttgaaaacctcatcaactttaggcatggccgtacggctcatcttgatcaatagaatgtgattggacatgacatatataccacttccaaatagaagctttaaatgtgattttgtgtttgacacactcttttgtgcctctgctccaggctccagactttaagcctctagaacgataagtgaataaatttcttttgttttaaaggcaccaagtgtgtggtgaatttgttacagtagccctagaaatctaatactaacaaaaagaatgttagagttgaattagaagtgtcagtgagaacttaggaatttaaaaaatcatattcttagcactgttcactgagggaatctagaagtaattacactgcagtaataacgagcccatcccatgcccaaatcttggtctctaactaccattttccagtcaaaagaatctgagctccctagagaaatgactttttcaaggctggatcaaggaaactgccaggcaatcttagatgatcttggtgatcttgatgtgccagaagattaatgggatcatgtgaaaagaacacagaaactggtctgaagggcttcctgttggccagatttgagacaatttgagcatcaaaaggaataatgagggtaatggatcataactggaaaatcagtttgcaaccatcaatgtacttactattgaatacttgtaaagaactttaagggttgctaataccattggataaaagcttgttgtgaaacagaatatttgcatggtctcaaagtctcactccacagattgttaggaaagggaaagggttacctttataaatatagagattaggtggacatcttaaccaagtgatcaaacttagcatcatcaataatgggacaatctggcatcgcatgccccctgatttaatgcagtaaggattaagtctaacaaaagatgtacaaagcctccaaatacagcgtaaacatttgtaaaataatctcagaacagggaccttaatgtttctcaaaaatttttccaaatacagaactttatttctatagatgtttatggtatatttgccatgctatatacattatgctatatattctatgtgctgaagatacaacaatgaccaaggtctttgcccttgtggaactgacatttggtggcggagacagaggaaacagtcaataagcatgtaaagagataaaggaaaagatactgaatgctacaaaggaaacaaataagttgagatttagaacaaaaaagagtcctattttacaagaggaataatgaggaagacctttctaaagaggtagctcagcactttgggaggccgaggcgggtggatcacgaggtcaggagatcaagaccatcctggctaacacagtgaaaccccatctctactaaaaatacaaaaaatgagccgggcatggtggcgggcacctgtagtcccagctacttgggaggctgaggcaggagaatggcgtgaacccgggaggcggagcttgcagtgagccgagatggtgccactgcactccagcctgggcgacagagcgagactccgtctcaaaaaaaaaaaaaaaaattgaggcagaatttcgctatgttgcctaggcttgtctcaaactcctgggctcaagcaatcctcctgcctcagcctgctgagtagctgggactccaggggcatgccactatgcttagtttaagaggtggtatttaaactgagacccgaagggtaaaaaacatggataaaagaagaaacagaaggggtaagagccttccaagcagagggaatcacatatacaaaggctctcatgttaaataaaacaagagttgacattgttgagaaactgaaagatcagctcatctgcgatgcggtaaaataggaggaatgcagtgggagaacagatcagagacttgggcaggggctatattaggcagaacttggagaccagagtaagggggccaaggtgggaacagaccgattaaattggcatctcttgggggggtgggggggtggggaacttacccatgcatcattttttaaaagctccaaaggcgattccaataagcagccagggttgggaacctagggggaaaatgtagctagatgaatgaagatggcccaaacgtcttttgttctgatagctaaactctctgtaggatcacagtgttacttcacagtgcatttgccaggaaaagtctcttcccatttggaatccgaagtaaaactgacaccacacttgaagatgccaggattgttagaggaaaatgtcacccaatagctccaggaagcaggagccctactgttgctgtttaaccacttctttcccattttggtggcaagttgcctccttttacacaaactgcctcaggagatcctaaagatatcatggtgtctgtctgtccttgcaagagcatgcattatggtaggacattgccttcattctgttcctttttctccaagactcttgcttattctcaccatttggctggactttctactgtaggattacctcggaatccacacaaaacccacagggtttcagagttgccttgaattacacgttttgaacattcagatcttcattttcccaaacatccacccagttataggtgacctttgctccaaagtcctggagtagcaaggtgccttgagtcttagactcttcccacttctttctctcttctgcatcccctcctgccaaggttgcccagccacactaaattgcatgccttgctgtgttgcattcgttatcattctaaagttgtcaccaacatgtgcgaaaccagtttatctaataacgatagctaccattttctgagctcttgccatgtactcctcttgccacagcaaatgcattgacaagggagtctgctggccaaagcctgactctcatctccagatggtccaacacagatgctgtgtgtgacccaggacaaagcacttaatgtcactgaggtttgggaagtgggtgagaacactgtagatataaggcctagctagagtgaaggcctccaaagcagggtgctcttaattctagatgtcccagatgcgtaggacagagtcatctagtcatcttccagggtttaatcctggactactggaaacaactagaagtgagaaaagcgtctgtgctttgcagtgaccattgtcctgtcagacaaccaataaatgctatctttcctctttcaggtttttcagggaaatcaagactccttcacacctgtggtgaactctctagacccaccgttactgactcgctaccttcgaattcacccccagagttgggtgcaccagattgccctgaggatggaggttctgggctgcgaggcacaggacctctactgagggtggccactgcagcacctgccactgccgtcacctctccctcctcagctccagggcagtgtccctccctggcttgccttctacctttgtgctaaatcctagcagacactgccttgaagcctcctgaattaactatcatcagtcctgcatttctttggtggggggccaggagggtgcatccaatttaacttaactcttacctattttctgcagctgctcccagattactccttccttccaatataactaggcaaaaagaagtgaggagaaacctgcatgaaagcattcttccctgaaaagttaggcctctcagagtcaccacttcctctgttgtagaaaaactatgtgatgaaactttgaaaaagatatttatgatgttaacatttcaggttaagcctcatacgtttaaaataaaactctcagttgtttattatcctgatcaagcatggaacaaagcatgtttcaggatcagatcaatacaatcttggagtcaaaaggcaaatcatttggacaatctgcaaaatggagagaatacaataactactacagtaaagtctgtttctgcttccttacacatagatataattatgttatttagtcattatgaggggcacattcttatctccaaaactagcattcttaaactgagaattatagatggggttcaagaatccctaagtcccctgaaattatataaggcattctgtataaatgcaaatgtgcatttttctgacgagtgtccatagatataaagccatttggtcttaattctgaccaataaaaaaataagtcaggaggatgcaattgttgaaagctttgaaataaaataacaatgtcttcttgaaatttgtgatggccaagaaagaaaatgatgatgacattaggcttctaaaggacatacatttaatatttctgtggaaatatgaggaaaatccatggttatctgagataggagatacaaactttgtaattctaataatgcactcagtttactctctccctctactaatttcctgctgaaaataacacaacaaaaatgtaacaggggaaattatataccgtgactgaaaactagagtcctacttacatagttgaaatatcaaggaggtcagaagaaaattggactggtgaaaacagaaaaaacactccagtctgccatatcaccacacaataggatcccccttcttgccctccacccccataagattgtgaagggtttactgctccttccatctgcctgaccccttcactatgactacacagaatctcctgatagtaaagggggctggagacaaggataagttatagagcagttggaggaagcatccaaagattgcaacccagggcaaatggaaaacaggagatcctaatatgaaagaaaaatggatcccaatctgagaaaaggcaaaagaatggctacttttttctatgctggagtattttctaataatcctgcttgacccttatctgacctctttggaaactataacatagctgtcacagtatagtcacaatccacaaatgatgcaggtgcaaatggtttatagccctgtgaagttcttaaagtttagaggctaacttacagaaatgaataagttgttttgttttatagcccggtagaggagttaaccccaaaggtgatatggttttatttcctgttatgtttaacttgataatcttattttggcattcttttcccattgactatatacatctctatttctcaaatgttcatggaactagctcttttattttcctgctggtttcttcagtaatgagttaaataaaacattgacacatacaaacaaatgcctttgagaattgtgtttttacactggaaataaaaatgtgaacactgatttttaaaacaaataggggcactgaatagcaagatggacactctagaaaaccaaattagtgagttagaaaaccagattaaattgaactcagagtaaaaatgatataattcatgagagtctgaataaaataaatcagaaatggagcctcaatccaggagaacagcttatatggagagagagagactgagagagaaatgggagtttctgttcaatgggcataaagtttcagctatgctgctgggcacagtggctcatgcctgtaatcctggcactttgggaggccaaggcgggcggatcacctgaggtcgggagttcaagaccagcctagccaacatggcgaaatcccgtcgctaataaaaatataaaaattagttgggcatggtggcacatgcctgtagtcccagctacttgggaggttgaggcacaagaatcgcttgaacccgggaggcgggtggaggttgcagtgagccaagatcgtgccgttgcattccatcagcctgggcaacagagtgagactccatctcaaaaaaaaaaaagtttcagttatgcaagatgaattaagttctacagatctaatgtacaacattgtgcatatagctaacgataccatactgggcacttaaaaatttgttaagagagcagataccacgttgtgttcttactacagttttacaacaatgcaaaaatgcattgtaaacactatgtgcaaatagaatagcaaagaatgtatacagtgcccatgagcataacattctagtggacccacaatgcatcagagttcagtgagactcaaagggagaagaatgttggcaaagtcagtggggaggagaaaatgagtgtgatgaaataggcggtctcattaaacttcccttacaaaacacaagatcaaagataaaattattaagaatttcgagacagtgacatcagagcaaacgaaacatagg

SEQ ID NO: 5 - DNA, 188930 bp, Artificial Sequence
  synthetic construct
tcaccatggctacattctgatgtaaagagatatatcctatacctgggccaaatgtaaacagcctggaaaagtgttaggttaaaaacaaaacaaaataaataaatgaataaatgccaggtggttatgagtgctattgagaaaaatgaagccaagagggatatcagtgatgcaggtgggggtaaagagcttacaacataaatgtggtgttccatatttaaacctcattcaacagggaagattggagctgaaatgtgaaggagttgtgggagtggaactacgtggaaatctgggggaaaggtgttttgggtaaaagaaatagcaagtgttgaggtccaggggcatgagtgtgcttgatattttagggaagagtaaggagaccagtataaccagagtgagatgagactacagaggtcaggagaaagggcatgcagaccatgtgggatgctctaggacctaggccatggtaaagatgtagggttttaccctgatggaggtcagaagccattggaggattctgagaagaggagtgacaggactcgctttatagttttaaattataactataaattatagtttttaaaacaatagttgcctaacctcatgttatatgtaaaactacagttttaaaaactataaattcctcatactggcagcagtgtgaggggcaagggcaaaagcagagagactaacaggttgctggttactcttgctagtgcaagtgaattctagaatcttcgacaacatccagaacttctcttgctgctgccactcaggaagagggttggagtaggctaggaataggagcacaaattaaagctcctgttcactttgacttctccatccctctcctcctttccttaaaggttctgattaaagcagacttatgcccctactgctctcagaagtgaatgggttaagtttagcagcctcccttttgctacttcagttcttcctgtggctgcttcccactgataaaaaggaagcaatcctatcggttactgcttagtgctgagcacatccagtgggtaaagttccttaaaatgctctgcaaagaaattgggacttttcattaaatcagaaattttacttttttcccctcctgggagctaaagatattttagagaagaattaaccttttgcttctccagttgaacatttgtagcaataagtcatgcaaatagagctctccacctgcttctttctgtgccttttgcgattctgctttagtgccaccagaagatactacctgggtgcagtggaactgtcatgggactatatgcaaagtgatctcggtgagctgcctgtggacgcaaggtaaaggcatgtcctgtagggtctgatcggggccaggattgtggggatgtaagtctgcttggaggaaggtgcagacatcgggttaggatggttgtgatgctacctgggccccaaagaaacatttctgggtaaggtgtgcacacatctgtgttattagcagaaatgctaactgccaattcttttcataggtctgacctatttgttgatattttgttctgttttgtccattgcttctcttcgtcatatgctgctcctccagaatctagagactggagtagagggagggtgaagggacaaagacaaaacttccctctgcctgcccaagcttccatagagagaatcaaggcaatgaaatccaatcaatatcacacacaagtttcatgtctggttctcttgtgtgtacatgcaatgtgtgtttttataatatcttttcctactttgggtgtaaggataatatgagccttgagttcagaagcttttcgtgttttgggggttctggtgcatttaggcagagtattaaataactttatcaatattgtctatggtcatcagttgattcagatttttctacctcttcttcagtaaatattggtatattttggtctatactttcatagaaagcaatctactgtccctagatttgataatgtattggtatcaagttatgtaagagtctcctgtgattttgttaaactgttctgtgtctgtagttatattttctttttcattccttatgttgtatatgttctcttcctctcttttaaaaataatatttccaggagttttcttgattttattggtcttgtcaagaattttcttttggtttgatttatcaatctcttttttctttctgttgcatcagtttctgcttctactttcattgatttattccttccttctaatttcctttggttcattttgttgttagatttttgcttcttgagttgaatgctgaaatcatttattttatttttttgtcttctttaaatgtgtattataaagatttaaatataatacatagattgtggctgtgtaaacattaaatgtggtcatgttgtacatactttatattctttttggttctttctgtttggctccccaccctctttccacatcagtccccttctcccccacctcagctaggtaaccccagtatgataatatatattcacatacacatacacacacacaaaggttttcttggacattatttgttttataaaattgggacattatacacacatttctcactcattaacacgtactagaactctaagtcaattggtatagctttaattcattatttttattggctatataagattctatggtatggctgtatcacaatttagtcaatatgttcactttattccagtttttggctactatatcctatatcattacatactggtgcttttacttctgttgaacaaacttgcaagaggaatattaatggaacgaagggaatgtttccttctaagttttaatttccaaagaggtcagaacttttcaaacatttctaccatcgaagtatgaaaatggccttctctctgcattcacatagcgataagttttatcctgtttttaaaatttgccaattttacaggtgtagagtgatattgcatcattactttcattgtgttatttttatttctaataagttgagcatctttttaaatgcttgttggctattggatttatttgggggatttaattagtcatatgatttgcccattattctttggactctttcatttaaaaaaattatgagaacccttttattattacaaatattaactctttgtcatgtatattgcagttttccccaagatctattgtttgtctgttgactttcttataacttttaccaaaacagtttttaatttttataatcagagatatcttttctttcatatcttcagagtcggcaaggttggttaaaaatgtttcccacacctcaagattgtacgtgtaatctcccagattttcttgcaagatgtttactgtttcgctttttatatgcattgcttcaattatctgctaattacttttgtcatatggcatgagagagggatttgtctagttttatttccatccagatcaatagcctattgtgatggcaccttttgccactgatttgaatcaacacattcatcatataaagttctcatatatattagcatatatttctggattcattaggctgtttcactaatctactattatcttgctatgccagtaccatagtgatttgattacagtgagcctatgatatcttctgatatctggtgggtgaaagcaatcctcactattctttttgtacctttcttagctattcttagacactttattcttccacataaaactgttaagatatttttcaaattaaaaagatccaagccctgttgtgattctaactgcaatttcattaaactcagaccttaattttattaatgtaataaatttaaatatttttcttattacatttatctctgtgtattttataagtgtgatgctattgttaataagatagttttctcctatttccatttatgagtgcttagtaccaaatagagataagctattggtttgtgtattttcagctttttcttttgagcctgggtctcattttgtcacccaggctggagtgcagtggggtgatctcaccttactgcagcctcaacctcctggattcaagcaattctcctgtatatcagccccccaagtagctgggactacaggagcaggccaccatgcccggaaaatttttgtatattttttagagatgggtttttgccatgttacccaggctggttttcaactcctgagctcaagcattccccccacctcagcctcccaaagagctaggattacaggtttgagccaccgcacccagccattgtatattcatcttaaatctagctaccttaccaaatttgcctattaattctagtaattttaccctaaagtctctgtgagtattgaatcatatcataagttaaatgagacagattttagctcatttccaatatttatagccagttatttcattttcttatcttattgaatttattagaaaacaagagcaaatgttaaataataacaatgaaagtgaacattccttctactctatgattttacttgaaataatttttgtattttgctatttagagtaacatttgctgttttggtttttgtaaatggtgtttattctattctcatttgccacaaaatgtttatcataaataagttttcagcagctggtatcatctgaattgtcttctttgatatgctgatgaacaaattatgttcatagatgtcctgacactaaatacccttacattcttggagtaaaatctactattcatggaatttgatcattagtgggttctatgtactatttctttagactattcttagtagattttcactactcaacctactaataataataaacaaagttttgttggctttatcaaatgaattgatgagtactccatctttttctattgcttagaatagcttaagtaacatttgaattatccattgtctaaaagttaggtgagactcacttatgaatccatttggtcctagtggcatttgcaatatctttaatcacccctccaggctcttctatgataatcagtcaattcaagtttcaacttccaataattatatacctttctaggaagtaactttatttattttttcaattttgttgccacagtgttgcatgtagcactcactcatgattcttttactccacattatctgtagttatgtgccctttcttattcctaaattcctctatctttgctatttatctttttttccttgaataagcttgccaatgacttgtctattttgttgctggtggtgctcttttcaaagaatgggcttttggattttttttttttctagttggtataaagcatttttattttcactgagcagaaaaagaagctattgattcattaactgtgctgctttattggcatgtagctatgcactgttcacacattaatatataaaactcgtcagtctgttttattttgtctgatgggaaaacatgaacagtgagatttcttatgcaaaaagtgaacagttcaactatgctagctccatatacctttattaacattccagagacttatcctctcaacatgatctgatttctgtaggataacttttcaggaaaagtattttctgatcagtgaagcttggagatataaataagcaatcggccaggtatggtggttcatgcctgtaatcccagcactttgggaggccgaggcaggcagatcacctgaggtcaggagtttgacaccagcctagccaacatggcaaaactccgtgtctaccaaaaaaaaaaaaaaaattagctgggcatggtggtgctcacctgtaatcccagctactgaggaggctgaggcaggagaattgcttgaacctaggaggcggaggtggcagtgagctaagattgtgctcagcctaggtgacagagtgagactccatttcaaaaaataaaaaaataaaaaaaagcagtatctctcatattcattaactggaccctgactttcttaaagctcaccccaaagctgaagtccatgaaggcactagttctcaaacttcagtgtgcataagaatcactcgggaagcttattaaaatttacattcctaggccccatcctcagcaaactatttagtccccaggtaattctatcccaccccaccccagctttattgtggtataattgacaaataaaagttgtatatatttaaggtgtacaagataatgttttgatgtaagtatacattgtaaaatggtatagcatgaagggttttcttttcatttttttcagaatagtttgtaatatcttctttgatttcatctttgataatctagacgtatgattttaattgctttttaaatttgtttatcaagttagtttgtagtatttgggtcaacattgaatatcctgttaatttcctattgctgtgtaacaaactacatcaaatgtatcagcttatgacagacccatttactgtctcacagtttctgtgagttagaagtccaggtggactcagctggatactctgtgcagggtcatacaaggccaacaccaaggttttaatagggctgcactccttagtgaaagctcttggggagaatctgcttacaggctcatttggaatgttagcaaattcagttccttctctcactttccatgtagtgccctctaccagcaatggtgcatcaacactctctcatgcttggaattgctctgacttcaattttccgtgcatatctctggccttttttgcctctctcttttacttttaaggactcatgtgattacattgggccgacctgggtaattcagaatactctccccatctcaaggtcagctaatcagccccttaattccatctgcaaagtttaatttgccacataatatatttttggacatgacaccaaggagcaaaggtgatgtgggccaaatttttacctgccacaggtatagtttacatacaatgaagctcatcaattttaaatatgcagtttgatgagttttgacaaatgcatacacttgcataaccaccaccctaatcaacatgcatttacatcaaccctcctgcaactttttaatgagtctctcccactgacctggcctcagccaataaactgctatctggaagttacagatttgttttcacatgttctagaattttacatcagtggaatcatacggtatgtattcttctatggctttttttcttcagcatcatgatttggaaattcatgcaggttgttgtataaagtatttctatcctttttattgctgattactgctccattatgggattatatcataattttggattatttccagttaggagcaaatacaaataaacctgctatgaacagtgctccacatgttttgtgtgaacatctattttcatttatcttagttaaatatctaggagtggaattgctggatcatatggtaagtgcatgtttaagagaaactgccagacagatttcttgaacgtaccattctatactcccaccagcaatgcatgagagttccagttgcaatatatcctggacaacatttgatgttgccagtacttaatgactgcacagtggtatctcactatacttttttttttttttgagatggaatctcatcccatcacacaggctggagtgcagtggcgcaatctcagctcaacatctgcctcctaggctcaagcaattctcatgcctcagcctcctgagtagctaggactatggtcacacgccaccgtgcccagctaatttttgtatttttggtagagacggggttttgccatgttggccaggctggtctcaaactcctggcctcaagtgatccacccgcctcggcctcccaaaatgttgggattacggcttgagccactgcacctggttatacttttaatttgcgtgtctctgatgactaaagatgttgagcatctttgcatgtgctaattagccattcctatatcttcttggaagtgtctattcaaatcattggtcctttgtttttaaacgtagtttcaacttttattttagactgaggaggtacatgtgcaggtttgttacatgagtatgttgcatggtgctgaagtttgggttacgaatgaatgatcctgtcactgaagtagtgaacatagtacccaataggtggtttttcactccttgctacccttcctcctccctctttcctctagtcgtctccagtgtctattattctatgtccatgtgttctcatcatttagctcccacttctaagtgagaacatatggtatttggttttcagttcctgtgttaattcacttaggataatggtttgccagtttttaattgggttgtttgtcttgttattgttgagttttgataattttttatatattctgggtacaagactattcagaggtacctgttttgaatgtttttttccaatctatggcttgcattttcattttccaaatggtgtctttcaaatagtggaaatttatagttgtagttaagtccaatttagcttttcttcttctatgattcatgcttttttttcccctgtcctaggaaatctttgcccacctcaagttcacaaagcctttcttctgttttcttctagaacttttatcattttagcattagtatttaggtttataatacattttgagttaaattttctgtatggtgtgacttttctttctctattgaattcccttggtgcctttgtagaaaattaaatgactgtatataggcaaatctgtttatggattctctagttccatagatgtgtatatctgtgcttatgccagtaccagattgttttgattgttgtaactttatagtaagtcttaatatcaggcagtctaaaacctccaacttacttttttattgaaattgcttttgatatatttaggcttttatatttctgtattaattttatagtcaactagccaactccaccaaatagccaactgggattttgactggaattgaattgaatctgtagatcaatttggggagaattgacatttaaacaatactgaatctttcaatacaacaacatggtatggctttgtttctttaaattttctttaatttccctctaggatattttgtagcctacagagtagttcttgcaagaattatattaattgtatccccaagtattttgagggattcgatgctattgttaattgtatcatttttatttgttttcgttttccaatcatttgttactaaaatatagaaattcaattgatttttgtatattgaccttgttcactctaatcttgttaatttgcattttagctctagtagcgttttgcacttcttttagaatttctacatatacaataatgttgtctgcaaataaagacagtttgcttcttcctttccaaactggatgctttttattttttttttcatgccttactgtactggcaagggcctccagtacaatgttagatagaactgatgatagcagaatccttgtcttcttcctgatttcagagggaaaatattcattattttaccattaagtacaattacttgtaaattttttcatagatgccctttgtcaaattgaggaagtttccttctattcttggtgtgagagtttttatcaagatttgatattagattttgtcaaatgctttttctgcatctattcaaatggtcatatggtttatcttgtttattctgttatggtgaattaccttgattgattttttaatgaggaactagctatgtattcccagggaaaaaatccacctggttgtgacatattacattggtaatattttcgctatggactgaattgtctccacctccccccaccccaaattcatatgttgaagtcctaactctcaagatgattatatttggagatagggcttttaggaggtaaacaaggttaaatgaggccataaggatggagtcctaatctgataggactggtggcctcataagaagagagaaggttctctctctacactcatgcactgaggaaaagccatgtgaacatacagcgagaaggcagccatctaccagctgggaagagggctccactagaaactgaccgtgctggcaccctgatattggatttccagcctccggaactgtgagaaaataagtttctgttgtttaagtcacccaatctctagtattttgttatggcagccctggccaactaaaactgttttgttaagggttttggtggtgatggtggttttttagtttttgcgtctgtgttcatgatggatatttggctgtgattttcttataatgtcattgtctggttttgatataagagtggtattagtccgttctaatgctgctatgaggacatacccgagactgggtaatttataaaggaaagagatttaatggactcacagttccacatggctggggaggcctcacaatcatggtggaaggcaaaggaggagcaaagacacatcttatatggcatggtggcagacaagagagcattgtacaggagaactgccctttataaaaccatcagccctcatgagacttattcactataatgtgaacagcatgggaaaaccccactgccatgattcaattacctcccacctggtccctctcacagcacatggggattgtgggagctacaattcaagatgagatttaggtggggacacagccaaaccatatcaaagagtaagactattctttttttttttttttttttttttgagacggagtctcgctctgtcacccaggctggagtgcagtggtgcgatctcggctcactgcaagctccgcctcccgggttcacgccattctcctgcctcagcctcccgagtagctgggacgacaggcgcccgccaccacgcctggctaattttttatactgatagtagagacggggtttcaccgtgttagccaggatagtctcgatctcctgacctcatgatccgcccacctcggcctcccaaagtgctgggattacaagcgtgagccaccgcgcccggctgactattcttataaaatgagttgagacgtgttcactcttctatttaatgaaagagtttgtgtagaattggtatcatttcttttttaaatgtttattcaccagggaaatcatcttatcccagtgttttttgttttggtttggttttttttttaagggtcttaattgtgaattctatttttaataggtaaagggctatttgaattttctatttcttataggataaattttaataatttcttttaagaaattccatttgagactgggcatggtggctcacacctgtaaccccaacactttgggaggaggcagcaggattgctctaggccaggagtttgagatcagcctgggcaacataacaagacttgacttctacagaattttttttcattagccaagtgtggtaacatatgcctgtagtcccagctacttggaaggctgaggcaggaggatcacttgagcccaagagttcaaggctgcaattaactatggatcatgctactgcactccagcctgagcaacaaagcaaggctctgtctcaaaaaaagaaaagaaattccatctgagctgttgaatttaatagtataaagttcagaatatttccttaccattttttcactccttggaggtatgatttacatactgtaaaaatcacttattttcagtgtggagattcttttcctttcctaaatctccacatttttattgacatatactttacatatcataaaattcaccatttgaaagtgtacaattcagtggtttttagtgaatccgtaaagtgtacaactatcatctttatttaattccagaatattttcatcacctcaaaaagaaaccctgtaatcattaaacagtcacttctaattttcttcctttccccagcccctggcaaccattaacctactttccgtcactgtggttttgcctattctggatatttcatgtaaatgaagggataaaatatgtggccttttgtgtctagcatcttttgcttagcatgttttcaagattcttccatttttgcagaatgatagaggagttaaaataagaaaataaagatatagtaagaatgaaactattttcattttttaatttaaaaaaatcttccatgttgtagtatgtatcagaatttaactcctttttatggctgaataatactccattgtatggatagaccacattttgtttatccattcatctgttgatggacttttggattgtttccccttttggctattatgaataatgctgctatagaacattcatgtacaagtctttgtgtacatatgcttttatttctcttcggaatatacttaggaatataattgctaggtcacatggtaattctatgtttaacttttagaggaactgccagactttttcaaagcagctgcaccattttacattttcactaccaaagtatgagtgttccaatttttccatattcttatcaacacttgttactgtctgtctttttaattatactcatcctagtgtggataaagtgatatctcattgtagtttggatttgcatttccctgatgacttacgttgttgagagtcttttcatgtgtttattgaccatttgtgtatctcctttggagaaatgtctatttaaatgctttgcgtgtttttaattggattatttgttttttagtactgagttgtataagttctttatttattcttaatattatacccttatcagagctatgacatgaaaatattttttcccattctgtgggtagtattttcactttcctaatagtatcctgtgatgcacaaagtttttcattttgatgaaatccaatatttatttattttacccctttggttgcttgtatttttgttgtcatatctaagaaatcaatgtcaaatcaaagatcactaagatttaaacctatattttcttttgagacttttatagttttagttcttacattgaggtcattgatccacttggagttaattttggtatatggtgtgaggaggggatccaagttcgttctacagcctatatagcctgcagatgagcaatgttagtgaccttgaaagtagaggcccaggttgtcagtagcctggcatctaactaaacaaccatttatccattaaagttagccctgttaacaattaatattgagataattttacttaatacactgtgtatattagtgtccatctagcatgcagcctgaggcacagagaataatagtttgagtataaaattgaattgaatggaatacatcattaatttattatctagctttctgttattgtataggcagtcacatgtatttaccagaaaaaagttgatagaatttttattttaatgaaacccttttatactttagattattttgatgctgattaacaggataagctgactctggacacatcctgacagcctctgccaaggtttgaaataaacagctgggaaaattcagttttatattatctgttcccgcagctgctcagtttcttctaaccacaggtcagggaatataataggttttccgattagttttagataaaatgtgaaagaacagttcatgtcaaggacaatggttgccaaatatatttggcaggatttctatattgaatcccaaaggaaatacacaaacaaaaccccacaaaagttaggaaggagtaaaacccaggaaccctggaacattttgtcatttactatgcagatttgcctgaaagtgagacaggcaaataaatcacatgtttctgccagcgtggaaaatattcactcaaatggcaaaggtctcaggctggggagctggatattgtcctgtaataggttcatctcagaactgaatcacacacttggagggtgttaatgctcttaggaacatctagttattccctttgaatagagtcctgtcctgaatcacatatacttgacctagggcctaggcctttttgtttttctgtctcacaatcttgtttctccatcaattatgtgttttcactcttccctcagagagggaaaaagtgtttctgtgtgctcttgatcctgttccctctctgatcttccaatctattgctctataacatattttatatgtgtcttatatcttcattttagtcagaaacatttatttatttatttatttatttattttttgagacagagtctaactctatcccccaggctggagtgcagtggcatgatctcggctcactgcaacctctgcctcccgtgttcaagcgattctcctgcctcagcctcctgagtagctggcattacaggcatgccccaccacgcccagctaatttttgtatttttagtagacagggtttcttcatgttggcccggctggtgtcgaactcctgacctcaggtgatcctcccgcctcggcctcccaaagtgctgggattacagatgtgagccattgggtctggcctttaatcagaaacatttaaagtgaaagcactgtggtaacttatgttgaaataccttagaaatcaatggaaactgcacagagagggggtaggatagacgtagtggaaccaaggatatgatatggaaaaaggagaaaggtagcaaactagggatgagttggtgaatgtggaagggcataataatgttaaatgactgaaaactacataggcttatgttaagactagtgccatggaaatttttagaggtagatgacattagagtatgtttaaatataaattaatgttcttgcagtgagccgagattgcgccactgcagtccgcagtccggcctgggcgacagagcgagactccgtctcaaaaaaaaaaaaaaaaaaattaatgttactggttgtgttccctagatgtagactctgagatgaagattaacatgcaggaattttatttggagtgttcttgggatcaacacctgaggaatcagggataggcagagggagaagcgcgctgccgggtaggctccaggacagccttgctggatcttacagggagctctggagctggaatgaaccttccaggttggaccaacatgtccaggcctctgtgtccctgcactgagcactcatgaagtgctgtccatcctgggacagggcagagtcggcgctgggaagaggcgtggtctgcccagagagggggtggggcctgtcctggaaatgggcggggcatgccctggtagaggggcgtggtctgtcttgggaaggaaggtgcgtggcccccacaggcaacattcctctggggcaatcccggcgcacacctcagcggaggtgaaggctgacttcccacacccaatggctgggactggggagttctttcctagactgccatccgggcgcccctcaccctcttgctgctcagctccaggtcgtcgtgggttcagggctcagctgcacgctcctgcccgcgccctgggcgtgatggcacccccagcccctgccattcttccccctcaccccctctccctgccactgctctgcattgccctgggttagcctggcggggccaggtggcacccgccgtatactcttgcctttctgctgcaggggcctttctgctgcgggtcccagagctgcagggaggggcggcagagactccccacgtggctcattggcgggggtgctaatcagagttcttttgctgccactctttgattcccaaaccccatgtaatcttcttagtggggacacagaatcatctttgaattcatacatatacagcaccttggaggctggccctccatcctcacagagacctgcctccaagctggagttctacctgtgcctggttgtggacccactccctcatctcttttgctgtacaatgattccccaggtctacacggtgctatatggaattccacatcagtgaatcaaatcctctgtaagatttcagatagtggtgctggctaaggccctgaagggaggaaaggctaagttacgccaagattaggtatcacaatgaagtcctgtcctttctaggatggaaggagttcagtgtgtctggccaccgagaagctggtttgtctctgtgatggacaataccatattgcagcaatccccaacctttttggcaccagggactggtttcgtggaagataatttttccagagactttggggttgttgggaatggttacggcatgaaactgtccgcctcagatcatgcggcattagttaggttctcataaggagcacaaaacctagatcccttgcatatgcagttcacagtagcattcgcactcctatgagaatctaatgcagcagctgatctcacaggaggcagagcccaggcggtaatgcaagtgatggggagccgctgtaaatacagatgaagctttgctccctgcctgctgctcacttcctgctatgtgaccccattcctaacaggccacagaccagtactggtcaggggcccaggggttgggcccaatatggcatattgggagctcagcattgatttttgttgctggcaggttggactttggtggcaacagtagctagatcagccttagtcagtgggaagccacgcttttgggtccatgcattaattctctccctgctgctgtagccacttagctcatgtcttgccagtactgcgatggcctatgcagaggctagctgatgtgaattgccagagtcatttttatatgtgttgttggtttgtgcttccttcaagatggatgctttctgttggcattaacgtattacttggagatttttctagtttgtgtccactcactaatatgcctttgtcccaacttttttctggaagagcttccttatcagtacgctgggccctggccctcagccagtacagaaagtcatttgtcaaggccttcagttggcagacgtgctccctggactacgtgctttctcgggtgtcccagaaaccctggaatggagtgaaatgcagggctacgtgggagagcagggaggcaagaattaagtcggccccacctttgcccaactcagtgggtctccttgagagaggtctgcagtttcaaggagacttttcagccaatctgctgcgagatcctgtgaaggggtgtgaaggtcttcctctgtgactatagattggccagtctctccttgtgtgtccaacagttttcattatactttatgtgaattaatgcaaaactgctaggtttaaactgctcaccattttagggatcccttctggattttaccttccttaaggggaaattttcctcctttcctcagttcatcctttctgccttggctttgacgtggtctggaggccacagagcctcctcctgagaacctctctctggtgtgtctgtttgtgtccgtccctctcctttcgatcattccctgtggttcctgttgggcgcggctcccataaacgcacagagcagggtctgctttgtctgcaacctgatgcattgttatttctcaccaaaacttgcagtccaaacatcacatttccgggccacactctttgtcagagctccaggggcacaaccccggggacctgctggaaggtgccaccgtgacgtgtgcctagatgcgttttccctcagttaccacagcgttcctctggttctggtggctggagggtgaccgcgtgcttcatgaagggggtccttactgcttcgcatccacccttttcacggaaagcactttgtcacatgttttcagtgtttctaagcgattttctgccaatcttgtgtgctaagattgtgtggcagcgtttccacagatttatagctggcaatgaattctcccaaaggaaatcagacaaaataaaatgtttccaacattgttcacatactgacaacttatgtgcttccttgggtgattttacaactttttaagcacatgaataaaaattattgtctgcttttttctccttttttctctcttttttttcttgcatgcagaaagtttataggagggggatcctctggatcaacacccatgggggagtgaaggaagcaggattgggtaaaagaagttgaggtgatacagtctgaataaaggtcagtcccacagggagctcaagctaggatggctctgcagagatgttctctattgaggcaagttgtctggacctatatagtcccacctttaccaggaataaggcatgagtttggatgtggtgactgacttcagccaaaattggttctcagagaggaattcagattagagttgtcagctgtcagcacacccagcagcttaggaaataagtgctttagtcctgaagcggtgaatctggacaccagcctccactgtggtccaccctttctgctgctcagattcatttgcttcataagttctggaatggttccttcaggattctgatgggctccctttcctggggaaacaaaagagaaaggtttggaacacagcacaactcctgctgctttagcttttcttgagtctgcaactggtactcatcatcttccccttctactacccattctagatccctccccccaccaccctctcaattcatacttctgctgctccaagtgggttaccagataaggtatctggtcatcatgccctttgtaagccatgactgtacttgtccatttatcatcaacattgaacaagggaatactaagagatacccaggcagatgacctggctgccaaatatattctcctctgtctccattgtgtaatgtcagcccttcctcctgatgatcaggatcggttacgcttgccaggatagtgactcttttccttacctcttggtctcttaatagtgatctgaagtaatatgatggcaaccatagtttcaagtttaatgagactcttggtgtgtccactggcggacatattccccttttaagaaccagtacttctaaactctcagagcccagagttgggataagaggcatagtttccctaattgggtcactgggagtaatggtagtgtgaggctgctcctacttacactccttgttttccaaaaccatatattttacttcgggacacaccccactaaacgatggccattgatctagagtatatactgcatcctgcaggatggtgcctcgtccttaggtattatgtctaagctagtgcctcagctgtgccttcaacaagctgtcctaccactctatcaagtgggtagcttctgggtagtggattccatggtcatgtatcttcttgctttaaagtaggtctcttggtctgatgcagtgttatgtaagatcaaatattctgtgaggccttgaatggtggtgtttactgaggctcaccaagcaactgaatgattttcttgagaaatggtgacatatcagagccttagctttggtctctgttactggcaagttgaacattaacaacatcagtagctagatctgtattgatgagtccatgatgttgggcccatgcatagcctctgccatggctcctcctttcatacatccattttgtaagaattggggcaccaacagcagagactggtaagcatcaaagtggctaagtcattcagtctacttggttgtttagtgctgtttctgtggctgatgttcttttcatttattcattctgtaatgcgtatcctttgtagattcaatttccttctctctgaacaacttctttggatatttattgaaaggcaggtctactgtcaataaattccttaatttttattgtctgagaaagtttttatttctccttcatttttgaaggatactttcacagagttcagaattttaggttgactgttttttctttctctcaacactttaaatatgtcagtgcactctcttcttgtttgcatggtttctgaggcgaagttggatgtaatttttatctttgctcctctatggataaagtgtttttccccatctggtttcttacaacattttttgtctttgattttctggagtttgaatataatatgcctaggtgtagggtttttttatttgtttgctcgtttgcatctatctttttttttttttttttttttttgagacagaatctcgccctgtcacccaggctggagtgcagtggcgcgaactcggctcactgcaagctccacctcttgggttcacgccattctcctgcctcagcctcctgaatagctgggactacaggcacccgccaccacagctggctaattttttttgtattttttagtaaagatggggtttcaccatgttagccaggatggtctcgatctcctgacctcgtgatctgcccgcctcggcctcccaaagtgctgggattacaggcgtgagccaccgcgcccagctgcatccatcttctttggtattctctgagcttcctgaatctgtggtatggtgtctggtgtctgacattaatttgggggaaattctcagtcattattgctttaaaaatttgctcctattcatttctgcattcttcttctggcatttccattatgtgtatgttacaacttttgtagttgttgttccacagtttttggacattctgggcccatgcatagcctctgccgttgttgttggtgtttttttttttttcagtctttttttctctttgcttttcagttttgattggaagtttctattgtcatgtcctcaagctcagagattctttcctcagccatgtctcatcaaccaatgagcccatcaaagacattcttcatctctgttacagtgttttgatctctagcatttcttttttattctgtcttagaatttccatatttttccttatgatatacatctgtcattgcatgttgtctactttttacattaaagccattagcatattaatcatagtttaaaaaattcctggtctgataattatgacattcctgccatatttgactctgattctgatgcttgcttgttcagtctcttcaaattttgtgggttttgccctttagtgtgccttgtaatttcttgttaaaaggtggacatgatgtactggctatgaggaactacagtaaataggcccatagtgatgtggtgagatggaaagaaagaaaagatgctcaacatcactaatcattagagaaatataaatcaaaactacaaagagatactgcctcacacccattaggatggctactatcaaaactaaaacagaaaataatgaatgttggtgaggatgtggagaaattggaacccttgtgcactattgcaaatgtacaatagggcagtttctctaaaaattaaacagaattaccatatgatccagcaactcgacttctggctatatatgcaaaagaactgaaatggggtcttaaagagatatttatacatcaattgtattagggttctccaatgaaacagatccgtgtgtgtgtgtgtgtgtgtgtgtgtgtgtgtgtaaatatatgccaatggtaaaagtacagggtctgagtcagaaggcagaaccaagaatgcttatgtccaagggcaggagaagacagatgtcccagttcaaacagggagagtgaatttgcccttcctctgtctttttgttctattcaggccctcagtggaatggataatgcccacccacattggtgagagtgatcttctttaccaattcacatgctattctcttctggaaacatcatcacagacatacctagaaatactgttttgccatgtatctgggcatctcttagcccagtcaagttgacatataaaattaaccatcatatccatgtttataagcagcattattcacaatagctaaaatgtggaagtactgcaagtgtctattgacagatgaatggataatctaaatgtggtatatacacacaaagcattacgaaagaaggaaattctgacacatgctacgacatagatgaaccttgagtatattacgctaagtgaaataagccagtcatgaaaagacaaatgctgtatgattccacttatattgggtacttagagtagtcaaaatgatacagaaagtagaatggtggatgccagagactggaggaggtgagagttattgtttaatgtttatacagtttcagtttacaacataaaattaattctggaggtagatgggagcatattacacgttttctttttggagatgggatctcactctgttgcccaggctggagtgcagttttgtgatcatagctcactgcagccttaactgtctgggctcaagtgatcctcccaccccaggcaccaaagcagctaagaccacaggtgcacaccaccacgcctggctaattattattatttgtagaggccaggtactgctgtgttgcccaggctggtgttgaacccctgggctcaagtgatcatcctgccctggcctcccaaagtactgggattacaggtgtgtgccaccacacctggccagaatatttaatgctactgaactgtatatttaaacatgcttgggctgggcatggtgcctcatgcctataatcccagcactttgggaagccaaggagggtggattgcttgagcccaggagtgtgacaccagcctgggcaacatggtgaaaccctgtctctacaaaaacattaaccgggcatggtggcacacgcctgtagtcccacctactctggcggctgaggcgggaggatcactcgaacccgggaggtggatctcgccactgcactccagcctgagcaacagagtgagaccctgtcaaaaaaaaaaaaaaaaaaaaaagatttacgatagtaaattttatgtgtattttaccacaattattaaaattgaagaaaatccccatgggtcactggtttaccaatttagccattttcaccatttttagattgcattttccttctctatctcagcattctgactaaaggaaaagcaaaatttcttacaagaatgaatgattctccagtgtggctgctcctgaaaggaacaatgagacttttgttatttcaccacaagactgagaaagaaataaacaagtgataaatgcccagaccccttcttattcattccacatcctggtaatctgaggcatggtgtggcttttactccaagcatatgaatacttacaatcagaagctgcctctcctttccctcactttatcattattgccatcatttatgacaatggagggagtgtctcactggatgatatttggggttctttcttcagtggtccgccataccaagcatttatttgtgctgttctccatctttcacatctaccacttttcaaaagtccctgagagtcaataagacatgcgactcgaacaactgcttcacatctaagtgtatgtctttaaaaatctctccttttccatgtttatgtctgatgtgttttgttatggcaaagtggcatgtagtatacggttcataagtgaatcgatgtatatctgtggagggcaaatgctcaattttagatctacacatgaaagcttttttccagggcaggagccttgctttctccaactaagccttaattacccaaatgcccatgtgttgtgcctttggcttgttgaaatgataccaactggtaaaatctgatgggagataaaagttagatgtccagaagcataaaagtcaggaagagaggctctttatggcatagagaaagctgcagaactgctccatggtgtgcaaaactcatcagcacatgaaactagtgagtggagatagtcaccttcaaccactttgtaatttctaccaattcacttggggccagtgtcccttattcaccaagattcacattggtccttttgattatttggcgtgaggaggcccccagacatgctaaactgtcatgcagggagagaggaaaagttgggaaccagcctttgcttaaaagggctttgacaatggaggcaaataataacattttgggaacatttatataagtaattatataatttctgattcagtagctggttcatgaataaatgagtaattgggagtatctgagtggagacaagaatgaacattaatgtaggactgattctgaattacagcttctggcactagtaggtttcaatatacatagtctgctgaaaggtaattttctctgtgatattcctggtatccctaaggagggaagtataattttaggtacatactgacaaaatttgaacacaaggtacttagatgaaagttatagtctgttttagagatgaaattgaaggatgcagtagctattgctttggcaaaggatttttggctgatgcagtgtatggttattgattttatgattcttatcatatggcacctaatgtatcagttgagttgtgaaaacagtgtttcggtttaatggatgttagggatttatatacaacttcaaatttgcctccttgctaatagtagaaaagagtagtatggaagcattacttccagctgctttttgaagtgtccaccaaaatgaacgactttttcctttcttcacgcagatttcctcctagagtgccaaaatcttttccattcaacacctcagtcgtgtacaaaaagactctgtttgtagaattcacggatcaccttttcaacatcgctaagccaaggccaccctggatgggtaatgaaaacaatgttgaatgctatttatgaaattgggtatcttattttctatcacagattccccaatcttgaggttgcagttaaaaagtgcagctgccaaagagaatgtttccctaactgctacctatagggaaatacactgactgcattttctgtctttttgctgggccgtcttcctctgcttggtctatgccaactgcttacctccacttagatgtcaaataaagtatgtaacaacatgttatgacaggacattttctgtcttagaattgttgctgagaattataggtgggaagtatccccttattctaaagagagatatcagcctatcgatttagaacttgttcaggtagtagtccaaaattggttctgcaacccttaggccctgactcacctccaaccttgtataaaaaaaggctaggaacttatggaagactttagatttgaatatttattatttggagagcctcttcggtgttttatgtgttgcttaccccatggggagtgggaggcctgtccctcatgtcaaggtataatgaaggaggcttcaggagaaccacttagaagactggacaaggtacctatggaacttgggagacactgaccactgcctggtttttatctggataaattttcaaggtcagaggccaaaaggacttctcctgatggaatagcagggggagtgggcaatagtgggagctaactgcactaccattgttaggtgtaaggccaggaaggtcactgaatgggacttgtcttacaaagactctgcctgagaggtcttcctgccaggattagataaccccaatagaaaaagcctgtatgggttgtactgccagaagcagaatctgagaggagagatacaagtgaccagctggagaaggtatatcccatgccaagatcaggagcagtggggtgtctccttgttggcagggagaggtctccaaataactcataagttccctaagaaagaaaggcagaattttggtatgtgtcacaactagggagtactaatgccacattatcactgctccttccaagaaagactttgtcattgtgcctatttgtttttaccctcccccctcctttccacttgctcctaccttggcaggtccagagacacaaaggtgagttggggaggaagattaggagaggaaggtgggaaagcagcgaagctgccaaaacaaattacctttacatattgcagatttctggggctgtcagaatgtagctggagaaggaagggaacttgcaattgcagaagacatcaaaaatttggtattagactggactggacttgttagaacctaagagtgatactgttggttaatacctgaaggttactggaaaagatttgggatcaaccaaagtgcaagaaaagggagatctcacataaagtaattaaaagcagtggtctaagaaaaataaggctattttatgtttttatcccactcaatccagttcattcaacagactgtttataggcattttatacttagtgtattcataaaacagagctcttaattttcctcctgattttctgtcatggcctgactaacaacccagttgcacaagccaaaatcataggagttttctttgactcctctctttttttctatctccacatcatatttatgagcaagtcctgttgactgttcctccaaaacaagttccaagtcttcttattttacttcttgtaaaatccaaattcatccaaattcctgtggcctgcaaggtcctacatgttatgtttcctttttgaccatattttctgttactcctctgctgattcactgtgcttcagccacactttacttgactataccaaacttatttctgcctctggacgtttgcatttgttttatctgttttcaatgctcttccactagatctttgaaaatcttgcttctttttcattagtcagatctctactcaaatgtcacctcctcagagaggcccttcctgactactacactgaaagtatcctctacctcctgcctcatcactttctagcagaccactatcttttatatttataacaacttgaaattttcttatttatttctttatgtgcttaatgtcttgagaatatgatctccattatctgtcttgtttgctactgcacctccagtgcataagacagttcctagaatatagtaggaactctagttgaatgaatgaatgaattgaatgattgccagaaatcttgcctcagagcaaccataaggttaggctgatgttggcagcaagcaaatactactttttgtcagtaattacaggggcatgcttctccactgtgaccttgactctaacttttggaataacaggttttctggagtactatccccaagtaacctttggcggacatctcattcttacaggtctgctaggtcctaccatccaggctgaggtttatgatacagtggtcattacacttaagaacatggcttcccatcctgtcagtcttcatgctgttggtgtatcctactggaaagcttctgagggtgagtaaaataccctcctattgtcctgtcattctatgaatagaacagtgagatgtgtgtgctttgtaatggtggcgttacaactcttttaaggtcctaactgaacattatgtgtatttcttaacatttactagattataaatatctcaagatagggaaatccatcttatttattgctgtgtccttagcatataacatattgcctaccctatagtagatactcaatacaagaatgagggtgtagtggacaccagtcattttttcttcctaaaattaaacatttctcacctgtataccccctaggaattgcttttctgaatatacttcaaacagaacctgccattttcttaaagcccatgcctccctagccatagcagttgatctaggagtgagcagttgacacgggtatcccacctccttggccacagttgattggtccagagatgggcaccttacccaagctaggccaatgagagtacttgcactagcattttgaaatttatgagaaaaaggacctattattaccaggtaatcctatacttaggggatggagcccaaatataataaaatcaagattctactacttcatgtatatcatgtgggccatggatcttataggagtcttaagggggtgttggtcttgtccttttcttagttgcctagctctttgcaggcatggtgcaaaggcaggacaatctacctttatctgctccttctataccactgatcctaccctaaacatgtagctgtataatcagagacaggaagccatggcaaatctggagggtctcggcttggctatatcttaaagagttacatgtattcgtagttcaacattggggaaattttccaaaaattggtggagaaacgagtggccaatgcaattttatctttttttttctgctgacatcagggagagataagagctttaaaatcacaattatggggagataatattttaaaatccagctcaagttaaacccatcagaaaaggtaacaccttttgggacccccaaatggccacatcttatccaatgaggggacaccaaccatagagtctatactgcacagttcaaatggtagccatgagctatcaggcacttgaaatgtggtgagtcctacttgagacatactgtaaaatatacaccagatttcaaaggttaagtacaaaaaagactaaaaatatctcattcattgtttataagtacaagttgaaatgcttatatttggatatactaggttaaacgaaatacattattaaaataatttcacctgtttctttttacttttcttaatgtgactaccagaaaatttaaaattacatatgtggtttgcattatatttctattgaacagtgaaatgtttagcatatgttgaagttgctgctcctgatgcagtggctcatctcagatttggccaagttcttctgtccaaggaaaactaggttcaacccattcctggagaggaacagactcaaatctttctgggctgggtcacttaccttggttaaatctgttctccacctattctaccaacaaccaaagggatggacatagctgaaataaaaatcacgcaatcacactgaatggtatctcacctcaggtgggccttcagcattgcctagccattctactgctacatttcccctaatccatttactctccctctccccaagacagctataatgtttcacacattgttagcctctcattgaacctccaacatgtgctcccgcccctgcccccaccacaacgtgagccttgggaaaaagggtatttttttcctaatgaaatatttcaaacaaagataaatacagaaaataatataacaaacaaacatgtgcccatcacctcactttgccaaatcttaacattttgtcatctttgcttaatttattttacaaaattaagcattttacatacagtctgtactcctctatggggctggcaggaaaaggctctcattgtcaaagttcaaagtaattgatcattgaaaaaataatgatcacattaaaaacaacacttatataatagagatacatattgtaatactcataaatgaaatgatatcctgtctaggattggcttcaaacacatccaagctgatgttacaatcattaggtgaattcctgatgtggaatttgacatttgtatggcgccaaaataatatcccagtgatttttttctgattgtaagtggaaatgttaactttagaatggaggtatcaggctaatccacaggtcagttttagtgtcactaaggatgggatggccagatattatctgcccctgatatggcacaatatgagggactcagcatcatctttgatatattttagccaaaaaacttatttaatttgaatctaatcagaacttaggcatattcaatagcatgggatattctacaggactacaagccaaatttctttcaccaaatgagtgtcagaaaaaaagggactactccatactaaaagagactatgggcctaaacaaccagatgcaatctgcagtcttaggttggattctgatttggaccaactagctacaaaggatgcctttgaggcaattaagaaaatttgaatattgcattgatattaggtgatattaactggatcaggtgtgctagtgtcattttgtttatgtgggcaatttttttttaaagatgacttctaaagtatataggagtggactatcatgaaatttgtaatgtacattaaaatgcatcatcataaaaagtgtgttgaaagaaaaaagtgaaagtagcagtgcaattctaagaataattttctaacatccactcacaaaaatattaaattctttatattaaacacatgaaaaagaacacaaatatatctgtctttcaagattcatctcaaattccacctccttcatcaagcattactgaagagtaggaagcttgtttactttttttatccactgtgttgctcgctccaagggcatagagacttctatcttgatctttatattttcagcttgtagctgagtctggtaaagaataagaactcaataaatatttgtgaataaataggtgaatatttccacatggtattataattatatctttatatgtctatgtcccccaccaaacatagtgttgtaccactaggaaagaacaaagtttaagaaattttcttaaatctctctttcttactgttccgtgaccctcactagtgcctaccaaagagtctgtgacaaagtgtatttgttgttgaattgaattaggcaaaaagatgcaataatggaagcaatttattatttaacagaatgtggagatatcaaccagaacctagtttttactgctcatgctagggttagtgatctcaagatcctctggagtatatgaagcttctccccatttgtggctgctgcttgttagtttttcaaattaagatgcagaaagtaggccgggtgtggtggttcgcgcctgtaatcccagcactttgggaggctgaggcgggtggatcacaaggtcaggagtttaagaccatcctgaccaacatgatgaaaccccatctctactaaaaatacaaaattagccgggcatggtggcacgtgcctgtaatcccagctgctggggagtctgaggcaggaaaatcacttgaacctgggaggcggacgttgctgtgagccgagatccagcctgggcaacagagtgagactccgtctcaaaacaacaacaacaacaacaacaaagatgcagaaagtccgtttcttatgtagaacctattggtgacaataaacttgacatgtttctttgagtgtacagtggatatagaaaggacaattttatttcttcctgctataggagctgaatatgatgatcagaccagtcaaagggagaaagaagatgataaagtcttccctggtggaagccatacatatgtctggcaggtcctgaaagagaatggtccaatggcctctgacccactgtgccttacctactcatatctttctcatgtggacctggtaaaagacttgaattcaggcctcattggagccctactagtatgtagagaaggtaagtgtatgaaagcgtaggattgagatgaaataagcagagaagtacaaacaactgaatctatctataacagttagcatttgtgttccttcacctgaaagaggcttttttactctagcatcatgctcatggaaaggagaataatccagtttctgagagaagcagatatgcattctatataaccacaataaactctaagctgggatcaggaggagctgagttccagaattaaatctctctcctcaaagcattgctattttcctcttcaaatctgtgggctttatcagtagtgatttctactgtcctctgccttttgcaaactttgagctaggttccttgaaaacttcatggaggtaaacacatccaagtgtgtgatcaatggcatatagactggttcaggtggttagtttgtcatctgtaaaccaaaagtatataaaaatctaagaaaagtcagcatttatttatatgttactgaaaattaattaatttggattgaattaatatattctaaaataattctaatcaaacctgtttttaatttataccttagcataaattagggaagtaaattttgcataatttgtttttatcctattttttatggtgaaatcagcttcactgtaccttttccttgttccatttatcttttactgcataactccacaatttagtggcttaaaacaacaacagtctcttattatctctcatggtttctgtgagtctcatggaatttgtcagtgttttgacttggtggcctatctaagtgtgtctcatgaggctgtagtcaaacagtggctagagctgaaatcatcccaaaggtgactttattcacatgtctttgaccttggcttgatggtactctccacatgatctctctcacatgggttttacagggtagccagacttcttatatggtcctgagatagcccattagaagctgtttcacgatttctaatgtaaccttggaaatcactcacataacctacattctattagttagaatgcatcactaagaccagtctataaagggagactccaccttttgatggggaataggcaaagaatttattaacaggaatcaccatactctttctgaatggtgatgatgaatgtgattcaaaaaaaggatgggagcggggagtggagaagatgagaaaggtttgtagtttataatagtttcagatgaaagtatgatttctcatatactgagttcagtttcatagtcataattaatgagaaagtgccaaaaccacagtgtattatttatgggatgtaaaggctaatggaacaatgagatcatcaaaacattagtgtttacatatgacatataaagaaataagttaaaaacccaaatgattctttgacacagagttgaactaaagagtctacagaggttctagttccaggtgaaatggataaacacactccaccctttatttcccattgaacttaactataaaaccttgacaaaatgcaaagcccagatatttaaaaatttctaaaaagcaaatagaacaagtatatagagaaaagacactagaattgaaagtattaccaaacttgtgggggagtatacctttttccccactctagtattccttaacctgaattaaaacataactggagacttcgaagtgagtactatgttgcaaagagagctccaggacaaaccctctggggtttcaaggagtgagaaaggtaactctaaatgctcagagagcgtgggaggggaaatcccctagggtttttgtcctcttttccaccattctctcaagcttcagtcccaggttgcctgtggcaatgacagtggctggcaacagaaacctgccggagtaaaaacttagggaggggaacattattcttcattcagtacagctacagatctaagacattgggggaaaagcacattactttctctctgtctttccccttccattgcttgaccttagctatgatgtagttgtggaaattggaagcttctggttagaaaaccaaaaaagggagctcacagaactggaaagtttatagatgacagagagaaaagatcccaggaaagtaaacccataaagttgtgcattaactcctggattcacccccaacctacacatccaggtatgtagtttcagtgtcagatctgttttaaaccccttgcagtgccattgagtccaacgcagtggccagtctggtgcttgaggggaaatctcagtttcacagtcttcaacatgttccattagcctttacgtcccataaataacacactgtggttttggcactttctcattaattatgactatgaaactgaactcagtatatgagaaatcatactttcatctgaaactaacgcccacagaattccttaaaacatgtctgatggctgaaagcaaagatagaacattgtgagataggttttttaatgtatggtagatacaatacataaaagaatcatagcataacaagaggagggtaaggaaaactttatggtccattcaacttcattccaattcaaatggtaaaatgttgactctaagtagatgatagtgaaaggttaagtatgtattttgtaatccctagagcaaccaataaaaaattataccaagagacacagtaaaaagtcacaataaactaattacaatggtatatcaaaaatattcaaataactcaaaagaaggcaagtaaggagagatgaaaatcagagagaagaagcagtaaaatcataataaaatgataggcttaaatctaaacatatcaatacttacattaagtgcaaatggctaaaacacaccaattaaaaacagagattagcatactggatataaaagcttgaaccaattatatgttgtttacaagaaactcatttcaaaaaaatgatataggtaggttaccagcataaagatggaaaaggatatatgatgcaaacatgaatatgaagaaagttgaagtagtacaaatctgtaatcacaacattgatttttgccaggagtgccaaaaccattcaataggggaaagaatagtgtcttcaataaacagtgctgaaacaggtgaatatctgcatgcaaaatactgattgagtatcccttacctgaaatgcttggaaccaagaacgtttcagatttcagatactggaatatttgcacatatataatgagatagcttggggatggaacttaagtctgaatatgaaattcattttggatataaatcccttgccagttatgtgattggcaaatattttctcccactctatagtttgttttttcattcttttaatggtgtcttttataaagcaagagttatatggacaaacatatgaaaagatgttcaacatcattaaccattagggaaatgcaaattcaatcaacagtgatgtatctattagaatagctaaaataataatataaaattgccaagaatcctgtcaagaattcagagcaacagaaagtttcacaatgcacaatggtatagccattctggaaaacagaatggcagttttgctgcttggtagagaaacagtctctggcagtttcttgtgaaattagatgtacactatagagggatagcaggagggagttctttttggatattgaaatggatctgtatcttgacgatgatggggtttcatgagcttatatctttgttaaaagttatagacctatacaccaaaagaaaaagtcaatttcactataattgaaaatttatataaaagtaattagaatgttttaagacagctttatacgtattttaaatgtgtctctaaagtttttaatccagtacttctggtaaagatggcacagggtcttcctacttagccatttttccatcctccacctcaaccccaacctcgctgaaaaccaacaacaaagataggtaaaccataaatagagaaaatcgaataggcatggtcagctgaaaaagaagataaatatttgtggaccagaagcagaacaggaactgtgagtagtaaaaggggtggaaattacaggccaactgagatctgggtcaggaagccagctgcggtagccaaggagtcaggatgacaaggataaatagtgctccccaccagagggactgagagcccatatcatagagttgggctcttcttcacttgaaagagagctgagcacagctgctgctcactctttgtttagggccatggctttgtggaaactcagagtcctagaagaggggaaagcaaacccagtcctagaataggaactgaactaagttttcttggttcagtgggggaatctgcaatatccccaaggtttccattggccagtatctccaaaattccattctagggtatgatttgctagatagagaatagtgaacacatcctttgcttaatcaaccaatgatcacaagggacagcaaagatcactatagttcaacaaagtcagatttattggctcatggcaacaagagactgtggacacctccctaaacaaagggaaatactgtatagagttagtaaagaattttggggaagggtggaggttaggtgatatttaaatgaagcaaagtagagttgtgtgtaaagaaataaccatgaggtctagactgtgaagtgttctaaaaagttaacatagacatgaaaggttaagtcaaggcaccccttacctgaagcttgagctttaaattgagctgcttctttgtgtcaaagtaatttagatgacctaggaaagaatgagatgtttcattcttgttgctattagttcaaacatttctggcaggctgtgaattcagagaacaaacaactcaattgagtaagaaagcaagagataatcaaagcaaatagttggcattcagtgagtttatacagtggcaatgtgtccttgggagaaatggtgttgttaactctgcagttagctttatctatgtctcttatcccagcctgatgagtagcagcacacgtactgttgctttcttagtccaagctaatttttatttctaagcattaagggtgcgagagagagaaagaacggcaaaatgtcataaacaaaaatctttctactcaaaataagcctgtaaacaaaagtttccagtcaaatttaaaaaatatataattctaagaaagatagccaacaagctcaacagttaaagcatgaaacaagctagtttgttccattaaaaacttcagctatcgatatacacggtatttatttaaaatgtgagtataattagaagcactgtgggctattgaaaaaaaatcatgagtatagatgtttaatatggacaattgctattttactcaaaacttttaatttacaattgcagaagtataaaaagttacaagagtaacagaaattatctataatttcactattatcacacagtgtgtgagggcttgtattttgtaagtgtttttaatttttttctttagtaattcatttttatcatattttacacaagtagtggtcttcatcaaagttgaaataaaaaaattctttgctccagatagttttagaaacactgctataggagacctgacatcaaagccaagttatcaagagacagaagactacatttgttcttactgtcaagtaactgatgaagaactgtctcctcctagtgacaatttcctacaatgagattttttaaatagaagataaatgttctcacttctttttcagggagtctggccaaggaaaagacacagaccttgcacaaatttatactactttttgctgtatttgatgaaggttagtgagtcttaatctgaattttggattcctgaaagaaatcctctgctactattaagaggaggtgattatagaaagatcataaattacattactgttcaggaatgaaggagatggggttaaaaatgaattccaagaaaacaaaacgtaacctcagttccactggcagctatgaggtaagaagatagaggagctggataacggactggcctcatccccctcattaagactgtcaacaaatactttgggctctactttctaaatactttctcttatcttcatctattattaagtgcacaacctttggcaagttatttaacctctctgtgtctcggtttcctaaatggaaataatagtacatttttcataagattgttgtgagtgctgagtgatttcacttaagtaacctagagcactgtgtggcatagagtaggccctcaatagtgttagtacctccgcctcttcctcctcctcctaatgtaatcactatgtaatcatagtaacataatattcttcttgcccccttatcaatttacattgccatcttcttaattgaggccctcatgatctgtctcataactctcaaaggaagcttactgaagtgagtatctgatcttgtcactctagcctctacaatacttcagtttgccagtttcggtggctcatgcctgtaatcccagcactttaggaggctgaggtgggcagattgcttgagcccaggagtttgagaccagcctgggcaacagggcgaaaccacatctctacaaaagaattaaaaaatcagccggtcatggtggcgggtacctgtactccagctacttgggaggctgaggtgggaggatcacttgagcccaggaggtgaaggttgcagtgagctgtgattgcgccactgcactccagcctgggtgataaagccagaccctatctcaaacaacaaaacaaataaaataattcaatttcaaggtaaagtgcaaaatgcattatctattctctggtgacatttccagccttgttgtgttccatttcctgccttatcttccatgtcacccaaatatgtaatgctttttcttgcatgagacctctgcatatgcagtttcctctgcctggaaaaatctgtctccctctttacactaagtaagcttctcctttttctttaagtctgacttacttcagttatccccttccttaattccttctcccaggatgacctctagtctggattagatgcctgcttatatttccacagcatcttgagcttattccttatcatactatatcagtattttctactttatttaatatttatcttctttgatctcatatctttttcccttcaagcaaagtgaaatttcttctcctctctgctccctgtaacaccctactctcatctttattatatcactctttactctttattataattatcagcttctctgacgattccagctagagtgtaagcatcttgaaagcagaggctgtatcttcctctctatcatcagtgtctacaattagtagtgctcaataaatatgtgtttgaatgaatgaacaaatgaatggctgcctcataaagttttagcactagctaccagtccttcacacaaaggggtaactccagggagtcactgttcaatagtatttccagtgcttcagcccttatcaatttcagagacagtgttagggagctttcaggttcctggggtttcataaatataagctgggatgaagcaattataacggagacagggactgacagacagcctttttcctaggacaattttcttttttcttttcttttttttttgagatcgagtctcactctgttgcccaggttggagtgcagtggcacaatcttggctcactgcaacgtccacctcccaggttcaagtgattctcctgcctcagcctcctgagtagctgagattacaggcacatgccaccatgcccgcctaatttgtgtatttttagtggggatagggtttcaccatgttggccaggctactctcaaacgcctgacctgaagtgatccacctgcctcagcctcccagagtgctacgattacaggtgtgagccaccgcgcccggcccctaggatgattttcataagctttcttttaaataattcagctaataaaaagaattgaatcctgatgcctcaagctaaccaatattctgtcttctattattatccattcccacttattgtcatggacaaatggagggagagaaaatcagtttgagcaagagatgtctgcctttacataattatcttctccctccctcacactgactttgagaggataagtgctgtgtgcctactttgctgacaaaaatgcttaaggtgtgagcacactgggagcagggaaggagaaaggggaggcggtcattcatgagacacatgcttagctgactctatctttgccttctctctcatcagggaaaagttggcactcagaaacaaagaactccttgatgcaggatagggatgctgcatctgctcgggcctggcctaaaatgcacacagtcaatggttatgtaaacaggtctctgccaggtatgtacacacctgctcaacaatcctcagggtcttccaaattcagcaccagagttctgtacttcagttcacaaacagctcggcatctcagaggatatagcccactgaatacttgaagatctctggcctctggggatcttaatgtatagtaggcaattcctcttttggtcacctgaaaatgaaggcttacccatgtacatacagcccacagtcagatttttctttccttttcttaaatgtgagtgggcaaccaaggatgaacagacatttaaaaagaacctaaaatatggaagggatatgcaaagatgaacaaagaaaataataatcccagaataaaaaaagctatggctcagaacagaactcatcggaagctcttacttctattttcataaagattcaagaagatactgcatcaataaagtaacaataagatgccttccagttttaaaataggggcatagaggcaggctggctttactccctctcacagaaaaccaaaaccaaacatacagcaccaatatctacaccaacaacaacccagagctcacatgtgaggatgagacagttcccggagccacagagaagtgaaaaaactttgagaatcagacttccacatccatgactctccttcctcctattctgcccagcaccaagtgtatggaaaatctcccctcaactcatggtttctacactggaaaaagtgacattgaggtgttcaaccagcttctccaccttcttgggttccctggggggagatttgtccttgccttaacccacagaaaacatcatgactgtctgaaggcagaaatatcccagagtacaggcagagacaaatgagggaggaaggactaccatccccagccctggaaattctgctctataatttggccaaagacatgcaaattcagaatggccgtgcagcagcaccatgctgtagcaggtttatcctacaggtcaccttggcatgaatcactagctggccttccaacactgctatgataatccctttgggacctcacccacttgggacaggcagggctctgaccacttactggaacacctgtaatcccagcacttgagctcagcacaataacaataggagatggctactaccgttaattttatgcagttacgatttaatactggatctttacgtttgtttacatttgtcccaactggcaccttcatcacctccaccctccccaccccagactatggtaaccacgattctactctctattttcacaagatccactcttttagctcccacatgtgagtgagaacatgtggtattgccctgcagtgtcacctatgttgatgcaaatgaaaatattcttttttatggccaaatagtattccattatgtatatataccactgaactgtacacttaaaaatggtaatgatggcaaattacatatgtatattttacatcaataaaaagaaacttaaaaataaggtaacaataggattctatgaaaaacaatcataacaaaacgtgctcataaaaattataaacacaatggtcaaaatagaaactcaatagaaagtactaagaatagataaaatctttcataaggtcaaacaaaatgtggttgagaatatagttgacccttgaacaatgtgggggttggggtactaaccccctgcacagtcaaaaatccatgtataacttttgactccctccaaattcaagtactaatgacctattgttgatcagaagccttatcaataacataaacaacaaatattttgtgtatgtattatatgctgtatattttcaataaagtaagctagagaaaggaaaatgttatttatacttttctctgcttcttgggagtacttccagcatcactagtggcactttatacgggtcccaagtatccttcaaagtttatggagagatgaaatgcttatgcagagatgattagcatcatgcagagttttcagtggatgcctgcagcactcgagctcagcacaataacaataggagatggctactaccgttaattttatgcagttgcgatttaatactggatctttacgtttgtttacatttgtcccaactgggaatggtgccatgtatggttgtaagtatgtaagtttttataaatttcaactttttataatagatttttgtatattttatggtaataaatgataaaatagtctagtatcaacatgtatatgtatatataagtgtgtatacatatatatatatattttttttttttttttttttgagacggagtcttgctgtcgcccaggctggagtgcagtggcgcaatctcagctcactgcaggctctgccccccggggttcacgccattctcctgcctcagcctcccgagtagctgggactacaggcgcccgccacctcgactggctaattttttgtatttttagtagagacggggtttcattgtgttagccaggatggtctcgatctcctgacctcgtgatccacccgccttggcctcccaaagtatatatatatattttttgagacggagtcttgttctgtcacccaggctggagtgcagtggcacaatctgagctcactgcaacttccccctcttgggttcaagcgattctcctgccccagcctcccaagtagctgggattacaggcatgtgccaccacgcccacctaatttttgtagttttagtagagatggggtttcaccatgtttgccaggccggtcttgaactcctgacctcgtgatctgcccgccttggcctcccaaagtgctgggattataagtgtgagccactgcatccggccatctccatatattttttgcattcataacatacctttttcttaatttttttgatatttttaccctatgtggtccatctgacagttttttcaaattgtcataaatttccaaaaaaatctcactatatttattgaaaaaaaactgcatataagtggactcatgcagttcaaacctgtattgttcaagagtcaactgtgtgttttaaagcagattttaacatcaagaaatgatagaaaaatgataagaattaaaagagataaatattcatattagaattgcccatcaggagcttctgagtagctgaacgcatggaggttcctggagagtggctggccccatgccccttcccacatacccttccttatatatgcatctcttccatctggcgtttataagaaaaggtgctgactgctgaattataaggacactgtggtctactagataaaggttgaggagaggggtttgggcttctattgtcttctttccgggccttcatctcctgcttgtgattaagtagtgcatgctgagtggagcaaagtggtggaataggactcttcagcaataatctcctcacagaaacatcaaggtaacaactcgatgcgtgaaattaccttcagaagagttaagaaaacctgaacccatgagcaagactgtgaagcccttttggactgcaaagacgagtaaaaccatagttgcacataaaggggattggttctttatgactgagaccccacccgcaagccactgcagtaccacaggcggaaagtcaccatggacccacggtttttacaccggaaaactctcccgtatggcctgagtgccctctgtggatctccactaattagtagcagagccagcatgagacttgcgtctaacctgggctcagggcgccctctcgtgctaaaaggaaatacaacagccagtcctttcactttctttttgatatggtctctgttgcctaggttggagtgcagtggtgcgatcatagattactgcagtcttgaactcctggctgggctcacacggtcttcccacctcagcctccagagtgggactacaggtgtgtgccactatgcctggctaaattttcgggttttgtgtgtggggtggggaagattggggtattgctatgttgctcaggctgggtctcgaactcctgacctaaagcaatcctccagcctcagcctcctaaagtgctaggttacaagtatgagccaccacactcagccccactcaatttctaaacgagctcactgaaatagagcagtcacaaacaaacccagactgtgaacatgagaataaatacctaattcttcaatgtgtagacagggatgcacatctgcaaagaataagaatagcctaagaaagacagcctcaacaaatgaacaaaaaatcgtgccagtgactaatcctaaagacatgcaggtgaatgatctggtagacaaagaattcaaaatagctattttaagaaaactcaacaaacttttataaaacacagagaaacaattcagaagtttatcaaagaaatttaacagagaaattgaaggaataaaaaaagtcagaaatcctggaactgaaaagtataataaaaaatgacacatgcaatacaagacatcagcaacagaattgatcaggcagaagaaaggatcagcaagctcaaagacaggttatccaaaaatacaatcaggaggggcttcaggatggttgactagatgcatctagtgttcatcccttccatggagaggaaccaaagtagcaagtagataattatactttgaataggtcatctaagagagaacactggaattcaacagagcagtgacaggaagcattgaaagcaagggaggagagagaaataaggcctgtttgcctgggattggctgggagtctggaacagcttcctaatgtggggaaaaggtaagagacccttagtgttcctcattttcaccaaggactcttgcaatcctagccacaggagagcgccttattccttgacagcacagagactagcatagggagttgcctaaagaccgtgtgaaggcattgcaacagagagctcacgctggattctgcaattctcccaagcagctgcagcacagcaccattttgagaacacagcccacacatcctgccctgctatgatggccgtgacttaggcaggagccctgagcagtgatcctgccccacccagcagaggagtgcccatgcattttcacatattccaagaacaaattccactacctacaaccactgctgctgcaggctgctgtggggccaaaacactagtgaaccttgtgctcccaagctacctgcctacagctactccctgagaaagcaaccccaccttcaccaagagcagggctatagcacagctactgctgcaccccaacctgagcattttgctagtgacctcggtatcaccccacccctgcatagcacaaccagcacctcacacaccaccaaggagcctgagggcaggttcacgtagcccagctctacctgcccccagtacccaagcatatcatccaggggcctagggatcacttagccctgtccaccactggtggcacctgagcacctcctggggtctgaggtcaggcccactcaacctgccactactgccacagttagcactcactgcatgcaccacttgagggtctggagactggccatgcgatccatagcagccacaaccaacgccagcacagaccacttgagattcaggttgtttcattgctatgattgccatcaaccatgccactttgctgcccaggaacttgagaacccacccacccatgtgatccatcaataccacttctggcacccaagtaaaccacttggaggcccacaaatcaacctgcctggacctaaaaccagtgcaatcatatgccaccatggtacaccaaagacaagcacactcagcccactgctgccaccattggggcctgaagacaggcctacctggcatcccacttctcagaaaaacttcaccacagcctccactaataaccacaccctaagccactgagaaaatcacaaatatcactgatgctgtttagaatcttatacagaggctactacattcaccgagaatcaaaaccgaagtgctctacccaagcaacaccacagatacatcttcaggaaaaagttctttcctacaaaagcaaattttaaaaattggaaaaagtgattattacaccagatgtgcagatatcaatgtaaggacacaggaaacatgaaaaatcaaggaactatgacactccaaaggagcacaataattctgtagcaagagatccaaataaaaaaaatttaagatgggtacaaaaaaatagaaagaatgaataagacctgctatttgatagcacaacatggtgactatagttaataataacttaattgtacattctaaaataaagagtgtaattggattgttaataactcaaaggataagtgcttgagggtatacatacctcattctccatgatgtgtttgtttcacatcacatgcctgtatcaaaacatctcatgtgttccataaatatatacacctactatgtatccacaaaataaaaaaatcatagtttacaagcaaaacagtatatgtgaccattggtttttaagtaaactggccaacatctctttaaaaatttatgaaatcctggaaaaataattccaaattttgatactaaataaactcagtgagatacaagagaattctgaaaaaaatacaaagaacacagaaaaacaattgaggctatgaaagagaaatttacccaagagatagatatcaaaaaagaaccaaacaaaaattctggaaccaaagaattcattgaatgaaatacaaaatagatttgaaaggttcaacaatagaccggaccaagcagaagagtatcagaactgaaatacagatcttttgaaataacccaatcagacaaaaataaagaaaaaagaattttaaaaaatgagcaaagatttcatgacatattaggcactataaagtgaccaaatatttgaatcttcagtgtcccagaaggcaaagagaaaatgaagaggttagaaagcctatttaatgaaatattagatgaaaaatttccaagtctaccaagagatttagacatctagataaagaaggctcaaaaatacccaaataaatacaatgcaaaaaggtcttctccagggcacattatagtcaaactatcaaaagtcaaagaaaaaaatttaaaaatagcaagagaaaagcatatagtcacctgtaaaggagccgctatcagactaactgtgaatttctcagcagaaactttacaagccaggagagaatgagagagagagaaaaaaaaaaaaaaacacctgccagccaaggatactgtacacagcaaaattatccttcataaatgaaagagagagaaaaatattttcagacaaaaaaaaactgaggaaattcattgcaacctgatctgctttacaggaaatgctaaagggagtttttcaaactgaaagaaaaaggtcctaatgtgtaacatgaaaacatctgaaggtataaaacccacaggtaaaagtaagtatcccgacaaattcagaattctctaacatggtaattgtagaacataaatcacttatatccttagtaggaagattaaaaaacaaaacagataaaaataattaccataacctgttaaagaataagcaatataaaaagatgtaaatgatgacatcaaaaacacaaaatttgggagtcgattttttaaaaaattttcttgcaatcaaaattaagttgttatcagttcaaactaacttgttataactataaggtattctgtgtaagcctcatggtaattacaaagcaaaaatttttataatagatacactaaaaataaaaagcaagggattaaaacatactgatagaagaatcacttaaccacaagggaagagattaagagaggaagaaaggaacaaaggatctacacaacaactagaaaacaagtaaaaatatggcactaccaagttcttacctatcaaaaattaccttgaatacaaatgggttaaattctccaactaaaagacatagagtgtttggttttttgttcttgcgatagtttactgagaatgatgatttccaatttcctccatgtccctacaaaggacatgaactcatcattttttatggctgcatagtattccatggtgtatatgtgccacattttcttaatccagtctatcattgttggacatttggaccgcatattctcactcataggtgggaattgaacaatgagatcacatggacacaggaaggggaatatcacactctgggaactgttgtggggtggggggaagggggagggatagcattaggagatatacctaatgctagatgacgagttagtgggtgcagtgcaccagcatggcacatgtatacatatgtaactaacctgcacaatgtgcacatgtaccctaaaacttaaagtataataaaaataaaaataaaaaaatttaaaaaaagacatagggtggctgaatgaatttttttttaaaaaaagatctaactacatactgcctaagagaaagactttacctgtaaggacacacatagactgaaagcgaagggatagaaacagatattccatgcacatgtaaacaaaaagaaagcaggaatagctatacttatatctgataaaatagacttcaagtcaaaaactataaaaagagacaaacagccagacgtggtggctcatgcctgtaatttcagcactttgggaggctgaggcgggtggatcacctgaagtcagaagttcgagaccagcctggccaaatggcgaaactccatctctactaaaaatacaaaaattaaccaagcatggtggcaggcgcctgtagtcccagctactcgggaggctgaggcaggagaatggcatgaacccgggaggcggagcttgcagtgagccgacattgcaccgctgcactccagcctgggcacacagcgagaatctgtcaaaaaaaaattgacaaacaaggccattatataatagtaaagaagttaatacaacaggagaatgtaacaagcataaatatatatacacccaacattggagcacctaaatatattaatgtttgatctttgtattttctagtctcattaaaagtaagggcaaaaactacaattacttttgcaccaacctaatataaagcaaacattaatagaccaagggggaaatgaagacagcaatgaaataatagtagaaaactttaacaccccactttcaccaatggacagatcatccagacaaaatatcaacaaagaaacactggacttgaactgcactgtagaccaaatagagcaaacagacatttacggaacattccatccaacagctacacagttcacattcttctcaactgcacatggaacattctccaggagattatacattaggccacaaagcaagtcttaactaacttttttaaaatgaagtatttttttcctgccaataatggaataaaactataaatcaacaacaggaggaacaactgtacaaatacatggaaattaaagaacatgcccctaaacaaacaatgggtcaatgaagaaattaaaggagaagttaaaaaatttcttgaaacaaatgaaaatggaaacataacatgccaaaacttatgggatacagcaaaagtagtccttaaagaaaagtttatagcaataaatgcctacatcaaaaaaaaatctcaaataaacaacctaatgatgcatctcatggaactagaaaaacaagaacaaacaaaaccccaaattattagaagaaatgaatgaatacagatgagagcacaaataatcaaaatagaaactaaaaaatacaaaagatcagtataatgagttagttagttctttgaaaagataaaaaaaagtcaataaacttttagccagactaagtgataataaagaagaaaaacagaaataaatcagacatgaaaaaggagacattacaactgataacacagaaatacaaagaattataagaaactactatgaacaactataagccaacaaattgaaaagcctagaagaaatggataaattcctggacacatacaacctaccaaggttgaatcaagaaaaaatggaaattttgaacaaatcaacaatgagcaacaagattgaagcaaaaatacaaagtctcccatcaaagaaaagttcagtacccaatggcttcactgctgaattctaccaaacatctaaagaactaataccaattcttcacaaactattcaaaaaattgaaaaggaagaaactcttccaaaattattttaggaggataatgatcattatcctgatcccaaaaccagacaaaagcacaataacaacaaacaactacaggccaatatcctcaacaaaatactagaaatagaattcaacagcacattaaaagatcatttaccatgatcaggtgggatttatcccagtgatgtaaggatggtttaacatatgcaaattaagaatgaaggacaaaaattatattatcattttaatagacacagtaaaggcatttgacaaaattcaatatcccttcatgataaaaactctcaacaaagtatagaaggagcatacctatatgataaacctacaaacaagatgaaactgagtggggaaaagttgaaagcttttcctttaagaactggaataagacaagcatatccaccctcaccacttctattcaacacagtactggaagtcctagccagagcaattaggcaagacatccaaattggaaagaaggaagtcaaattgtccctgtttggccaggctcaatggcttatgcctgtaatcccagaactttgggaggccaaggcgggcagatcacttgatgtccagagttcgagaccagcctggcaatatggtgaaaccccatctctactaaaaatacacacacacacacacacacacacacatgctagccagacatggtggtgcgctcctgtagtcccagctactcgagaggctgaagcaggagaatcactagaaccccagaggcggagcttgtggtgagccaagatcgcaccactgcactgcagcctgggcaacagagtgaaacactgtctcgaaacaaaaacaaaaacaaacaaaacaaattgtccctgtttgcagaagacatgatcttatatatagaaaactgccaaaactacaccaaaaaactgttagagctagtaaatgaatgtagtaaacttgtagtctacaaaatcaacatacaataattgatagcatgtctatatgccaacagtgaacaatctgaaaaagcaatcaagaaagcaatcacgtttacaatagctacaaaaaatgtccagaaataaattaaccaaggaagtgaaagatctctataatgaaaactataaaatattgatgaaagaaattgaataagacacaaataaatggaaagatatttcatgttcatggattgaagaattaatattattaaagccaaagcaatctacagattcaatgcaattcctatcaaaattccaatgtcattcttcacagaaatagaaaaacaatcctaagatttgtgtggaaccacaaaaaatcccaaagagccaaagaagtcttgagcaaaaagaataaacctggaggcatcacactacctgatttcaaattatactacaaagttatagtaaccaaaacagcattgtgttgacataaaaacagacatatagaccaatagaacaaaatagagagcccagaaatacacccaaacatttaaagccaactgattttctacgaagttggcaagaatacatgatgggtaaagaacagtcttttcaataaatggtgctgggaaaactggatatccatatgcaaaagaatgaacctagaccccctatctctcaccacgtatgaaagtcaaataggccaggcacagtggctcatgcctgtaatcccagcactttgggaggccaaggcaggcagatcacttggggtcaggagtttgagaccggcctggccaacatggtgaaaccccgtctttactaaaaatacaaaattagccaggtgtggtggcacacctgtagtcccagcaacttgggaggctgaggcaggagaatcacttgaaccccagaggtggaggctgcagtgagcctagatcgtgctattgcactccagcctgggcaacagagtgagactctgtctcaaaaaaaaaaaaaaaaaaaaaaaaaagaaagacagaaagaaaagaaaagaacaatagattaaggaattaaatttaagacctgaaactctgaaattattagaagaaaacatagtgtaagcatttcatgacatcaatttgggcaagaatttgttagacaagacctcaaaatcatgagtaacaaaagcaaaaataaagaaattggattacatcaaactagaaagcttctgcacagcaaaggaaacaatcaacagagtgaagagacaacctatagaatgggagaaaatatttgcagattatacatctgacaagggattgatatctagaatatataaggaactcaaacaactcaatagcaaaagtccaaataatcctattaaaaatgaacaaaagacctgaatagacatttctccaaaagagacctacaaatggccaacaggtatatgaaaaatgctcaacatcactaaccatcaggaaaattaaaatcaaaactacaatgagatatcacttacccctgttagaatgactattataaaaaagacaaaataacaagtgctagcaaggatgtggagacaaagaaacccttatacactgttggtgggaatataaattagttaagccattagagataatggtatagagatgcctcaaaaattaaaaatagatctatcatattttctagcaatcccactactgggtatataccaaaaagaaatgaaatcagcatgttgaagaaacatctgcatccccatgtttatgacagcattattcacaatagtcaagatataaaatcaacttaaatgcccatcaatggatgaatggataaagaaactgtgatatagatacacaatggaatactattcatccatttaaaaaagatgaaatcctgtcattttcaacaacgtggatgagcctggaggacattatgttaagtgaaataagccaggcagagaaagacaaatactccatgatctcagtcctatgtacaatctttaaaatttgatctcatagtagttgagattagtgattctaggaagataagggggaagtgggagatggggagagattggtcaatgggtacaatgttacaggtagatagaaggaataagttctggtactctattgcacagtagggtgacaatagccaacaataatatattgtatatttcaaatagaagagaggattttgaatggtctcacaacaaagaaatgacaaacatttaaggtgatggatatgataattaccctgatttgaataattacacaatgtatacatgtattgaaacatcacattgtacccataaatttgtagaattatttatgtgtcaataaaaagtaatacagttaaaaaaataaaattgcccattaggataaataaaaagacccacacacaaaattatcattgtggcatttcagagcacagagagaagatacttaaagcttcttctgagaggaacaggacgcatacaaaagaatgggaattagactggcgatataattaagcaatattgtaaaagatctaagggaaaaattatttggaacctagaatttttagtcaaactatgaatcaattttgggggaagaaaaaagacattttcatatatagagggccttaatagtcactgaatgtgtactatagtaaaaccagaaactacataaaagaggaatttgggagattcagcaacccaagagaataatgaagtatgagggggatgttttctccttagttcttttccgtatttttcaataatttgataataaacatgcataattttataattaaaaaggaaattaattttgacaacatgcaagttcctgttctcacataccttatagtggagggacagattgtagtcaaataagcataataatacatgcaaaattacaaactgagcattactctgaaggaaaattacataattctatgtaagcctataatacaggaatctgacctagactggggaatcagagaaggcttccctaagcaagtaccccttgaacttagctttgaaactgggaaaatgaggcaatgtgagatgaagctgttagaggtattaggaatcaaacctattggggccttctagtccttagtagagagtctggactttattctatgtggaatgacagcctccagtgggttttaggctggcggatactacaatcagatctggaatgcagaaatagtacaccagtttctttgtgggtaaaagtcttagaggggagaatatgaccaactgtagggagacctgtaaaaaaagtttatcagtagctcagacgagataatggtaacttggattaagatagtggtagtagtaacagtgaaaaactagatacatttgaaagcttttagagccaaaataggaggcagctgtgcccttgttgttaccagtgtgggatctgaacacatgactacttgggttcaaatactgagcaaattaattaacctctctgggcatccgtttcctctcctgcaagacatggatgataatggtttctacattcatagggttgttatgaggaatgaatgaattaaaacttgtaaaatactttggacagtgcttgacataaaacaagtgctcaatacatattagctattattgattatattgccctggtcagtgtcaaactgcatatgggagatgagaatggtaacaaggataactctcacttgcatattcaaatgcaggatgctgccattcactgttataaaaaactctggaagagaatgaagtgatgaaaattgtaaatttggttttgaacatgtgggttttttgagatatctaggtggagatgttgagaaagtgattggctgtatgagcctggagttccagaagaggtcagcaggggagacagaagaaggagcagtctgagaagtaggagaaaaaaacccacagagatgttggcacagaggccaagggaagagagagttttaaaaacgaatgaatggtcaacaggtgcaaataaagactgaaaaatgtccattggatttagcagcatgatggtgattggtgaccttggcaagagctgttggtttgatagtagcccaatgttcttgataaatttgtttacaagtcaaggtagcaataaagtgtctaaagtcaatttgtccattctgtcctagcaagtgttttccatttcagattctctacttcatagccataggtgtcttattcctactttacaggtctgattggatgccacaggaaatcagtctattggcatgtgattggaatgggcaccactcctgaagtgcactcaatattcctcgaaggtcacacatttcttgtgaggaaccatcgccaggcgtccttggaaatctcgccaataactttccttactgctcaaacactcttgatggaccttggacagtttctactgttttgtcatatctcttcccaccaacatggtaatatcttggatctttaaaatgaatattataaatatccagtcctacttttaataaaatttactggacaatgtacaggaatatagtgtgttgctgaaggggacattatagagttactgtattagacctcagccaagatcccctagtttccagcttccagtgtaaagtttttaccttgactataaaagggcttgagtattagtaggactcatggatttttagttaaatgtctgtgatggagaaaagatggcttatggatgattgaggtgggaaaatgaggagaatagtatgcccttggtttctcagccttatcccattaattacgctccaatattatggagagaggaactgcaagttgtagctgaagagattttttttttttttggagaaatctagggaaatgggaaaaaaaggcattgtccagattgcaactgtaagggctccactatatcattagtaatgcccagagcagtaaatagcaaatatgacaggctattgtagagcttgacttcagacaccagacagccagaggcactctgtagatacctggcagtagatgagagacacctgtgaaactgagggcaggtcaggagctagtgaattttagaagtaacatgggattgaaaggactatttggtgggaactttggaaagggtcaaaggttctgtgtaagcaaattaggacgatggtaactacagttttaaattattgttaatgtaactttatttgtaactgctagttgtgcaaattcagattgcatcatcatttcaccccaattttccttacttttgtatttattctgctaactcttaatcttggatcaacctaataaccctctttctctacccctctcgtggccattgaaggctcttagtcagtttgtgctgcaataacagtataccacagaatgggtaatttataatggacagaaatttattggctcacatttctgggggctgggaggtccaatatcaagttgcctttttctgcgtcttaacatggtggaaggcattatatgacaaaagggcaaagaaagggtgagagagagcaagaggagggtgagctcactcctgtgataacaaatccactcccatgaacactttccccagataactgcattagtccattcatgagggtggaacgcttatgacctaaacaccttttatatgttcacctctcaataccatcacgatgataattaaatttcaatatgagtttcggaggggacagacattcaaaccatagcaagagttattggagaaaaatgtcggagaggcctaatcttttatatttaatagcatttctttcttcctattactctcatattaaccttctcctcaggttccttggttgacttagaaaagagaattgatcttgccatgcatccaccattttcctccttatgttctattagtgaccttgtttattgtcttctgtagtgattaagaatagaaatctctcttccccatgtgtcacataatatttatggaattttgacaagaccttagtggacaaaatgtgtcatactgaatgagtaacaggaagttgatgcacaaacaacattcttgcaggcacagaggaataggtcatttacttgtatatgatcattgtcaatcaatcattgtccagttggaccccgattcagtttattttttgttttgtttttctccttttcacagattctatccactaattttaatctttatttttcagaaaaaaatgctttatcttattgaacctcagaccaaacactttgtttttcgatgcagactgagttatgtttaaggctacatgaaccccagactagttgtttgctgctcctaaaaccttccctgttcctcataatcaagtaaacaggtctcccttcttagaagtatttgatcttcaaaattgccctgtggtataaatagggcaggaattattattatccattttacaaagcatgaagatgagactgagaatgttgaatacatttgccatagggtttacaactagtcacaggcagacatgctcttaaaatatatatctccttgattttaagttgtatcttgtcatggttttatgaacttggaacatgtcttaaagtttatatctacactaacatttttcccaataagctgttattaaatcaatgatttgtggcaagaagggatagtgatgtggaaagggggggtacttaggggagagcctggaaggcctaataagagagaaagaagtcataaaagttaaggcaagtgatatggtttggatatttatcttcactgaaatctcatgttgaattgtaatttccaatgctggaggtggggtctggtggcagatgtttggatcatgggggtgaatccctcatggcttgatgctgtcttcatgatatttggtcattcagaagtgtgtggcaacttgcactctctgtcttgctcctgctttcaccatgtgacatgtctcctcccccttcacctacccccatgattgtaagcttcctgagacctccctgaagccaagcagatgccagcaccatgcttcccatatagcctgcagaaacatgagccaattcaatctcttttctttataaattacctagtctctggtatagaacagcctaatatagcaagacactctgacattgtttggtttgtctgactccagatggcatggaagcttatgtcaaagtagacagctgtccagaggaaccccaactacgaatgaaaaataatgaagaagcggaagactatgatgatgatcttactgattctgaaatggatgtggtcaggtttgatgatgacaactctccttcctttatccaaattcgctcagttgccaagaagcatcctaaaacttgggtacattacattgctgctgaagaggaggactgggactatgctcccttagtcctcgcccccgatgacaggtaagcactttttgactattggtactctctcttccccatactcaaaaagttcttaccagttattcaaaccaacaaatcctgaagccatgtttaaggttaggtacaggtatggaatcaaatggcaagggtattaacatttggaaactaacatagctgagcatcagagaagcttgtatttttctcactccttgccttgattgaatcatataagctgttttagagttggatttgagcctacctagaatttttcttcccaacctctcatctttttttctcttatacagaagttataaaagtcaatatttgaacaatggccctcagcggattggtaggaagtacaaaaaagtccgatttatggcatacacagatgaaacctttaagactcgtgaagctattcagcatgaatcaggaatcttgggacctttactttatggggaagttggagacacactgttggtaagttgaagaaaagatttaaggtcaggtaagaagaaaaagtctggagagttttgagtttctaaaatacctcataattcagccttgtctccaatggacatgatcttttaaaagctataaatgttacacaaataatagctgattgtatgtatttaaagtttgagtatatagaataaaaatttaatgtcacccactaaactcgacactcctttgaaatactgcttagactttgatacatatccttccagatctttctccattaattatgtcatataggagtcagcagactatggcctgtgaaccaaatttggcttgtggcctgcttttgaacagtccatgagcttagatgagattttacatttttaaaatattgcaaagaaaagaaaggaggatgggaggaaggggaggagaaggcggaggagcaagagaatatgtgacagaggctagatagggctcacaaattttagagtacttactatccagccttttccaaaaaatgcttgcttgctcctgatctaggatattaagaatgagtatggtgtaagtaacagaatactcaatggacagtggtttaaataaataagggtttattttcttcacaagaaatttgaagattggtcgttggttccataaattcagccgctgaagaatgtcatgaagaacactggtttttagatatggagttttgttagatactgccaaactgactttcagcaattttgtaccaatttatatcccctaccataagtatatgactgcccttttccccacaccattgccaacaacatatattataaaccttcagaaaattttccaatttgatgagcaaaatgtttatatgttgtcttcatttgcatttccctggttagtggtcaaattgtatattgtttcatgtttgttggctatttgtataactccctctgtgaattgcctgcttgtaaattttgtccagttttctatttggtcagtcatcttttgcttatgtatttgtaaaaggtctttatagattatggatattgacacattgttatttatctttcaaatgttttcctcacattgtcacttgtactttaactcctttatgatattttttgtccttcaaagatttttcatctttatatagtcaaaacctcctatcttttatcaatcttttcatttatatgtctctggatctttttcacttatgttttctgcctgagaatgtctttgccacccccaagacactacaaaaatagtctatattttattctcttacttgtatagctttatttttacagtgagcaatctaattgccctggaagttacttttgaatgtagtgcataattcaaatagaaattttcccaaatggcagctgacacaaccaatccttttttcattaatttgaaaatgtcttctttatcatatactaaattgctaaaatctgggatttttaattctccttaactaatctgttaccaccctgttttaatgacttcaactttgtgatatgtttgatatctgtatgacatcttctttcattgtacttcttcaaaatttttattagctattattgtacaatttttcttcataaattttgtgtacgtattttttctatttttcattttttgaagattgtataattttattttttattcattaatttttaaaatgcataatgacacaataattttacatatttatagggtactttttgtgtattttgagttacttttactggctaatttaaaaatagataaacaagagcatgcaataaaatgtaaattttcctccctcttggacttccaaccccatagtctgacagacagtcattgctgtgggtttgtatactcccctccagaagtagtgcatacatgtacaaatgtgtgtgtgtatgtgtgtgtgtgtgtgcatttcacacaaaaacaagagcagtgtaaattggtctgtaccttgatttttaaaaggtaacaatatattttgaattagccaggcatggtggcacatgcctgtagtcccagctactctggaggctgaggcaggagaatcgctcgaatctgggaggcggaggttgcagtgagctgagatcgcaccactgcactccaccctgggcaacagagtgagactctgtctcaaaaaaaaaaaaagtaacaatatattttggatatcatttcatgtcaacatatatagatctaccccattctttgatttattcaggttatactctggataccatgctgaatcctacacttaaacattacctcaaaatggatcaaagataaaatgtaagagctaaaactacaaaattataagaaaacaacaggataaatctttgtgatcttgaattagacaatagtttattggataggacaccaaaaccaacaagcaacaaaagaaaaaccatttgacccagccatcccattactaggtatatacccaaaggaatataaatcatgctgctataaagacacatgcacacgtatgtttattgcggcactactcacaatagcaaagacttggaaccaacccaaatatccaacaatgatagactgattaagaaaatgtggcacatatacaccatggaatactatgcagccataaaaaatgtccccgtttgcagatgacatgattgtatatctagaaaacaccattgtctcagcccaaaatctccttaagctgataagcaacttcagcaaagtctcaggatacaaaatcaatgtgcaaaaatcacaaacattcttatacaccaataacagacagagagccaaatcatgagtgaactcccattcacaattgcttcaaagagaataaaatacctaggaatccaacttacaagggatatgaaggacctcttcaaggagacctacaaaccactgctcaacgaaataaaagaggacacaaacaaatggaagaacattccatgctcatggataggaagaatgactgggttttaagacaagagcagaagtggaagttgcatttttatcctcatatcacacacctcagatctggaggtgggattgatattttcagggttcttcgctgcagcttccatgttattgctcttccattctctctctctctctctctctctctctcgtctctgtctctctctctctctcttgagatagggtctcattctgtcacccaggctggagtgctgtggtgtgatcacagctcactactgcagcctcaacttcctgggctgaagtgatcctcccacctcagcctcccaagtagctggtactataggcatgcaccaccacgcctagctaatttttttattttttgtagagatgaggtctcactgtgttacccaggctggtcttgaagtcctgggctcaaacgatcctcctgcctcagcctcccaaagtgctggcatgagccactgcacctaggcctttgttttcttttaaagctggtgcaatcaggcaataccacctgctacccttgcttaatactgtaatcaactgtcctcttggtcatgcctgctcatgcactgaagattttatctcctgaaacactgtctctttctctattatcagtgaatttaatgcccaaatagtaataaaggctgagaggaagcagtgtcctcaccaggcatctaaatttcaattagtgtgagaaggtgcagagaatacttcctgaagcaattgaaacaatttttaaagaagtggaaaggggcctttagagagaaacctaagtactgtcagccctctacattgtcaactgaagaatcctaagtttgtaaatttggagtggaaagggttgcaggctgggaagtgtagcctctggcagcaaatggaagcaagcactttgaagaaggaaggatgagataagaatttatgctgaatgagttggctaagtatacatatttaacaggttccaggaggagctgtgaatatttatgatggggcacctgcaaccacacatgttacatacattccatgttcactttggggtggagacttaacatttagatgcatgaaaattaggctgtatatgtcaaaagatgaaacagaggacacagaggcagcctctgtaaactggccagagccagtccatggtcagtggtctctcatcaggaagcaatgcttctcggttgttatgataaaactgcacaaagggaggggaatccaccacgtctttagaaaggactggtttatgtttaacccttaagaaagaaagtctaacggcagattagggagggagggaatgtaacaaggcatgcccgatctcccatcccatcatggtcagaaactcagtttttaagccatctctggggtctccttggccgagaaaggggtctcttcagtcgtttggggatgcttaagattttatttttatttttcagtatcactggatttctagtctcatattcaaacaaccattgattgaaagtattcaaaaaacaaccccaaaacaataaaagataataatacaacaataaacaataatacaaagaaacaatacggtaaaacaactatttacatagcatttatgttatattatgtactgtaagaaatctagagacgagttaaagtacatgagaggatgtgcatatgttatatgcaaatactacatcattttgagtaagagacttgagcatcacagattgtggtatctgcaggggtcctggaaccaatcctccatgcatgccaaggaacaatttcatgaaaagaccaaatattttgagttttatctagcctcaaattactataatgtagatagaggccacttttatttatctggagttagaccacagttttcttgttgatcctagtcgttttaggatttgatcttagatctcgcttatactttcagattatatttaagaatcaagcaagcagaccatataacatctaccctcacggaatcactgatgtccgtcctttgtattcaaggagattaccaaaaggtaaatattccctcgatttatagctcttttttacctgtagatacagatgagataaatatcatcaataacaactaaaattatgttggtcctttctccagctgttggccggacctcaagctccagtctaaagttataaaaatcaattataggaatcctcaggtgatgtttcatgtaaattcgtgaagagtcgcctgacatgtttttcctattacctagcggtgatgttcaaatattccacagccaattagattccactgcaattggttccactgcaactactgtaaatgccctaaaatcttgaagctggttcttctggcacttaagataatttttttttctgagtacggttttcagctacattccacacttttggtatctagtgtggtattccacactttgggtaactagtttgatattttcaggattctttgctgcagcttccatgttattgctcttccttgctctctctctctctctctctcaacagggtttcactctcacttttggtatctagtttgatattttcagggttcttcgcatattcatttctaaatagttcacaactccagtttttatttactatattgtttgctgtttaaagatttattttttcttttagtagattggatgttatgtatattctttctattatttaattttggatgaatatttatcaaaataatagatgtgtatgcttaaaactacaaaagggctgcctccctagaggcatccatttttaagaatttctgtttttgatttttggtggttatctctacatctctaaaaagttacttatactgctaactctttgtttttcaactttagacattatatacttactttgttttgtgcttttttccattcaagttgtttcagttttatcagtgttttcagttggattggctatcattagaactttaaaaatatactaaacatcaacttttagtaagatattttccaatcatggattgaaaatatcttttgactccatacttcataaattaaggatattaaaaactgtacccctcacttttcctttccccaaacctttcttttctctactgctgctagccattcctttacttttacaaaactaaacttgataacatttacattttgtgctgtaatttgaaataactcttccttgctttgtctatatattttctctaaagcttaaaaaattaaaaaacagcatttgtattattttagtattttagcaagtttcttttcataaatgttaactgcagaactgggtaatatgctatgattgctctcttttctacagctcaagtgattttactattaagataaaataatatgtggaaggaaaaaagttgatctcatagaagtagagataaaatagtggttactagaggctaaagaggggaaggggagggggaaatagggagacgttggttaatggatgcaaaattccagctagataggaggcataagtcctaatgttctatagcactgtagggtgactgtagtcaacaatgacatctattttcaaatagctagatgagaggatttggaatgttcccaacacaaaggtgtatcctgaagtaagactttgttttcttttattcggaaaagaaatgtaggcttcttcaaccctatttcttaggcctttcagcttcttaatcattctatgtattgcttgctatccaaatcttttattttttttttgagacagcgtctcgctctgtcacccaggctggagtacagtggcacgatcttggctcactgcaacctctgcctcccaggctcaggctatcctcccacttcagcctcctgagtagttgggaccacagacgcacactaccatgcccagctaattttttttattatttttattttttgtagaaatggggtgttaacttgttgcccagactggtgtcgaactcctgagctcaagcgatctgcctgcctcagcctcccaaagtgctggaaccaaatctttttcttcttaaagacattcttgtagtgaatagcattaactacttttcccttgtacatttctattttttgatttcttcttttgtttttctggaagtatattctcaagtaacttctaaatatgtggtacatagagggtgaactttctgaatccttcagtatcacatgatgggcagacagactggttataaaaattttcccgctgggtgcggtggctcacgcctgtaatcccagcactttgggaggccgaggcgggcagatcacttgaggtcaggagttcaagaccagcttggccaacatggtgaaaacccatctctactaaaaatacaaaaaaaatagccgggcattgtggcgtgtgcctgtaatcccagctactcaggaggctgaggcaggagaattgcttgaaactgggaggtgaaggttgcagtgagccaagatcaccccactgcactccagcctgggcaacagagcaagactgcatctcaaaaaaaattccttcccctgttttctaatattcattattgccgataagaattctttatttgcatttctttatggaagaatggcatagtgacagagttctggggagattttgaatgtgtgtcccgaaatttggaggcatacgtggatagttactggtaacctgcttttccatggagaattttgaaggctgtaatgcccataatagtgggcaagaagagagggcaagagtggagcagtttaccttcctgctgtttgacatgagtttattctgtaacaagtgaatactgttgaaagtagctgggctttatcccttttgaagatattctacccaagaaggcagttaggcaggctgaggggatagcagaaccaatagagtcttggatatatcactggaagtaagaagagctgatggggagaggagagttgcagaaggatagctgaaagaaacatctctcatgtcatggaactatgtaatgctgaggtccccatggtaactctaaagaaaccatacatgtgtcctatgaaaagaccagcatttgggcacctcccacacagagaacattgatgaccaaatagtgttgtcaaagatagagcagcaggacctgttaaacaagagtctgtttgccctttcttctattacctaccctccctcacccccagctcctggaaaagggaagagaaggctcagaaatattgaaagaacatactacaccattccctttctttctttctttcttttttttttttttttggagacagagtctcgctctatcccccaggctggagtgcattggcatgatatcggctcaacctctgcctcccaggttcaagcaattctcatgcctcagcctcccaagtagctgggattacaagtgcctgccaccacacctggctaatttttgtatttttagtagagatggcgtttcaccatgttgaccaggctggtctcgaactcctcacctcaacaccattccctttctatggatcctctaaccataggtcaggcataacttactgaggtgaggaagagcttagaatgaatataaaattaaaattttgatttagattgtatcttcaggtatgaaacatacccagaatgagacttaattactaaaatcagttcttgtcctgaggacccattaccctgagggcagatctcagttcttgctccctttcctcacagaagtcagagactacaccttaaaactccaatgccaagctctttggcatatattcaggcctgacactttcacagtcaaccggataatcaattacagctttttactttttaaaaaaattgtttgaatcttaaaattataataggtgcgactttagcttccacttgctcagaaacttcatatgtacatacagatttgtagaacccttgcaacaacaacatgattatcaatatgtggcttgttgtactctaattgagctatttatggttttgcttgtgggtaggtgtaaaacatttgaaggattttccaattctgccaggagaaatattcaaatataaatggacagtgactgtagaagatgggccaactaaatcagatcctcggtgcctgacccgctattactctagtttcgttaatatggagagagatctagcttcaggactcattggccctctcctcatctgctacaaagaatctgtagatcaaagaggaaaccaggtgagttcttgcctttccaagtgctgggtttcattctcagtgtatgtccccttataacctgaagaaaatataatggtttgcaatataggtcagtaaaagaaatgagcttagcttttactaaatttgagtttcacgtagtaaacgtgcctgctggatggataggccatagaatgtaggccctagatttttcctatagtactcattcccagtctgggatttagctctctctagctgatcctccccatttttatatgtccaattaccacctattttcagatgacccacagatttatatctacagcctagatttcttccatggacatctcattatgggtgactcaaaagtacctcaaaattaacatgtctgcagcatgtagcactgttgcaggaagtcagggaccccgaacagagggactggctgaagccacggcagaagaacataaattgtgaagatttcgtggacatttattagttccccaaattaatacttttataatttcttacgcctgtctttactgcgatctctgaacataaattgtgaagatttcatggacatttatcacttccccaaccaatactcttataatttcctatgcctgtctttactttaatctcttaatcctgtcatcttcataagctgaggatgtatgttgcctcaagaccctgtgatgattgcgttatctgcacaaattgtttgtaaagcttgtgtgtttgaacaatatgaaatctgggcaccttgaaaagaacaggataacagcgatttccagggaacaagggagataaccataaagtctgactgcctgcagggccaggcagaacagagtcatatttctcttcttgcaaaagcgaataggagaaatatcactgaattctttttctcagcaaggaacagccctgggaaaagaatgcattcccagggggaggcctctaaaatggccgctctgggagtgtttatcttatgcagttgaagataagggataaaatatgccctggtctcctgcagtgcccccaggcttgctaggattaggaaattccagcctggtgaattctagtcagaccagttctctgctcttgaaccctgtttcctgttaagatgtttatcaatgacaatgcatgcacagcaggacatggaacctcattagtaattctaatttcgccctaccttgtgatcttgctctgtccctatttgccttgtgatattttattgcctttgaatcatgtgatctttgtgacccacaccctattcgtacactccctcccctttgaaaatcactaataaaaacttgctggttttgcggcttgggggcatcacagaacctgccgacatgtgatgtcacccctggagacccagctgtaaaatttctctcttttgtactctttctctttatttcccagaccggccgacacttaggtaaaatagaaaagaacctatgttgaaatattgggggctagttcccacaatatagcacagtgcatctcacttagtaagagcttaataggctacgtgcggtggctcacgcctgtaatctcagcactttgggaggccgagacaggaggattgcttgagctcaggatttcaagaccatcctgggcaaaatagtaagaccttgtctacaaaaaaaaaaaaaaaaaaaaaaaattagctgggcatggtggtgtgtgcctgtagtcccacctactcaggaggctgaggtgggaagatagcttgagcccaggaggtcgaggctgcagtgagcctggatgacaaagcgacaccctgtctcaaaaaaaaaaaaaaaaaaaaaaaaaaaagcttaataaatacttttgggcaaaacatagggaaagatataaaatatttcaaaatatggctagaatttggaccatttctactgctttaaaaaataaagctaaattctctgaacaagaaaagcttagttcttcacaaaaactcattgctcggccccagaataactcagtgccatattgctgaggcttgactacatgtccatttgattatatttatgatacataagatccctactagtctgaaaacatttcatatgtttagagagtaaagtatatgaactttggtgccaataaaacacatggcacataaactcagagaagtataaattttgccaagtacttgtcctgaccgatttttcctaactatagttttttcgtcacttttgggaagagaactgaaatattattctatattctccaatctcctctcttcagtattttggtttatatagctataggttataaaaaatgaggtttatacatattagtgaggtttacatatgaaatcttagcagatccaattagcaagcgactaattcataaatctggttcatatacaaaatgctcttctgaaaaaaatttgaatgttttaaacagaaaatttaaggtattagtgttgtttgacatttttgtggttcaccttatctttcttatttgatttctgtttttctatttttaattttttatagccttgtggaaggtcagttgctagatggaagtttaggaaagtcagtatctcatttgacttaactaacttaagaaaggcactgaataaccacttggttctttaaggagttaaatcttctaatctgaacatgaagagaataaggctacagactgtaccaaataaatcagctagcatatggccttgggtgcagaaaaaactaagttcagtgggatcagtcaccctcttgtcctggggacacatttgttgtaagcatatactcactgctcatagcacccaccctcaactcccaagccctggtacatgcctaagaggaaatggaattaaaccaatggattagatatatcacatgcatgccatcgctttcatcatagactgctagctcctacctgacaacatcagtagcatttctttacccctttcaatatatgtaattaacagataatgtcagacaagaggaatgtcatcctgttttctgtatttgatgagaaccgaagctggtacctcacagagaatatacaacgctttctccccaatccagctggagtgcagcttgaggatccagagttccaagcctccaacatcatgcacagtgagtaaagcagcacttaagtccagtgggtggtgaataaagaaaaattgatgtaatcaaagtgatgtccagataatgaatgaattgtatgtgcacataaatttaacaattatgttacctataaatgtataatttttactcaaacacacgtgatcatataacccatattttaaaaatccagtcaccattttttcctttcaatatttacttgatttccctctcccttttaattccctatctccttctatattacatcttttcaccaaccattccatgcccaggtaacatattttaagacatattttctctataattatataatcatatataaacacatacatacattgtattagtcttctagtgctgccataacaaagtactgcagactgggtggcttaaccagcagatatctattgtcttacaactctggaggcttgagatcaggatgtgggcaacgttggtttcttctgaggcttctctccttgtcttgtagatggctttctcccttgtcttcacatggtttctcctttatatatctttgtcctaatctcctcttctaataaagataccagtattgttgggctagggcccaccgtaatgaccttattttaactaactacctatttaaaaacactatctccaggtatagtcacatgctgaggtactggggtttaggactgcaaggtataaatttgggatgggggaacacaattcagcccattgcatacatacacatgtgtatatatttatatataccacaaatctgaatggtcaaaaatatggtaaaaaattccaattgcactatcctacagggaaatgcgaaatagaataacaataggatagcactttatacccatcaaactgccaaaattataattactagtgggcttgtggataaaagagtgttctcatgctatattagtggataagtagtatagtcttttcaaaaccaatatatgccttttgaaattctgattattaagatgtttaagatggagtgagccacatttccctgtgtgtcccactggatgcaactaaaaatcctgaacaggccgggcacagtggctcacgcctgtaatcccagcactttgggaggccgaggcaggcggatcacgaggtcaggagatcgagaccatcctggctaacatagtgaaaccccgtctctactaaaaatacaaaaaattagccgggcatggtggcggccgcctgtagtcccagctactcaggaggctgaggcaggagaatggcgtgaacccggaaggcggagactgcagtgagccaagatcgtgccactgcactccaggccggcgacagagtgagactccgtttcaaaaaaaaaaaaaaaaaatcctgaacgaaatgcatgggaaccttgaaaagttataatgtgagttatactcacctaccagaatgtggcatatgttacaattctatgcccctcctctcaaagctttagccctttaactttgggttgagcctcatatttagcttgaatttctagtaatagtgatatattattctccagagttaaagtcctttactatccattattctaaaaattttaaggttgtttagtcctttgagttgcatttttattttttacatagttcagggtattgctttccttctgaaggattcagatttcacatttgtgcaagagtctaatgcttagtatttaattctagtggcacagagctttttcttttctccctcttctctccagcctcatggctttggtttagaattccttcagcctgatagaatattgtattttataatttccttattgtgctatttactagatatttgttcttctatttttttctattcataatttctccctttcccaccacatctttttccaagtaggatgtgcacttgccacagtatctggacagttaaactgtctcattttcttggagacggtgatgaaaactagagagatatagtgacataagcagagccagaaaacaatttcactgaagatgatatatattttttttcctctgggatttctaatatagcttttggtggagataagagtctggaattgagaaagaagagattggaattgagaaaaagagtctgagaaagcacagggagagacacaaaggcagagaccaagagacacaggggaaggatcttcagaggaagagtccagggagaaagatgctaagacagagggataagaaaagaagaaaaaaaaggaccaggaggagagagacccaaaccataaatcactcctatttccattagcagtaaaattgataatctattttcatacaatgaaataccatgtgacaatgaagattcacaaaaataaagctatacacaacaatatgaataagtatcacaaagacaatttttagtaaaatggtaagtgtcaaaagaatatatacagtattatattatttacataaagttcaaaaatgggcaaaattaacttatatagtttagggatacagaggaagaaaagtataaaggttagtaaggacatgattataataaaagacaagatagtggctacctcttagaaagagttcatttgagaataaacacatgtgttttgtggggatagcagcaatattgtatttcatgacctagatgtttgttttataattttgtgttttaaaaaattgtaggatttatgatttatttcgtagatggatcctacaaatgatagggaaattgcagtaggaatgaagaggaaggaacatgtacaggatttgtttagaagatagaaggcacatgattttgtaaataattagctatgtttggtaaaggactaagaggattcaaagatgattaccaaatttctgatatgggtaactagaagaagagtgagacaaaatggaagaaagtgtatttaaagaaatgatagcaaaaactttccaaatctggagaaagatgtaaatatccacgtacaagaagctcaaagatctctagtcagattagattcaaacaagactatatgaagacacgttacaatcaaactgtcaaatatcaaagacaaagagagaatcctgaaagcaacaacaaaaaagaagcaaaccacatacaaggaaattccaataaggcagaaactttacaggtcagaagagggtgggatgatatattccgagtactgggaaaactttacctagaaaatgtttccttcagaaatgcagagagataaagactttgccacacaattccagttagacaagagaaataaattaaagacatctattgtacactatggtgactacagttaataaattacccattccaatatatacatatataaacattgtgatgtacatcataatatattctatttttccctgtcaattaaaaaataaatttaaaaagattggatagagaagaatcagccattctagtaattaagcctgaggaagcttacattccagtgatttcagataaccattatgcaagttaaggaataaactggataggatgatattaaaaaaacaaaaccaccaatgagatacaccagaatggctaaaattaaaaaggctgtccataccaagtattggtaaagatgtagagtaatgagaactctcataaatttctggtcaggaaatccaaacatcgaaagccaaacatcggcataccctattgactcaggaaatccactcctagtatacacctgttatgtcctgaatcatgtcccctagaattaatatgctgaagccctaacactagtatttcagaatgtgactgtatttggagatagggtctttaaggggtttattaagttaaaatgaggttgttacaatgggccctaatccaatatgactagtgtccttataagaagaggaaatgtgggccaggcacagtggctcacgcctgtaatcccagcattttgggaggccaaggcgggcggatcacgaggtcaagagatcgagaccatcctggccaacatggtgaaaccccatctctactgaaaatacaaaaattagctggacatggtggcgagctcctgtagtcccagctactcgggagactgaggcagaagattgcttgaacccaggaggtggaggttgcagtgagcagagatcacgccactgcactccagactggcagacagaccgagactccatttgaaaaaaaaaaagaagaggaaatgtgtacacacagagacaccagggatgcatattcacagaggaaagaccaagccaaggagaggtgtcagtaaaaaccaaacctgccaataccttgatcttggaattttagtgttcaaaactgtgagaaaacacattcctgttatttacacctcccagtctgtggtatattgttatggcaaccctagccactagtacagcacccaaaagtagtgtgtacatatttcacaaaagacatgtaactatttaatccatgtggagtgtcaaaaggcaaaaatacaacaaatgtattttaaagattgtaattggcttttatacatgattctagaatcagatagccctcagaaccaaatacagaacagcagccagcaacatagtatggatagaaattggaagtgaggtttagagacagcttaattgattacagttgggcatttttgccttatttgaagctgttagtcgcctgcaattgatggaagttcagctgctataatcggctgagactgagctgtttgttataaaagcatattcctaaattaggctttcagttagttcatcaactaagccaggctgcaactttgttgtgcaaggactcaagtgcaaaggtacccttaggcaaaattcagattaatttaaaaggactttacttttgttagttatgtgaaatgaagtggaatctattttttccaagtggatagtcatattttctattatcatttaccaactagctgatttttttcctgtactggttggagatgctgcctttattatatattaagtttcaacttattatatattaagtttccgcttacatcttgtcagtttctggactccatattttgtttgatatatttatctattctgcattaagactgcatttttaattataatagctttataatatctcaatgttgtataggaaaaaaacttcaattattaattagttatactaagccaatgtctaagtattgcttagtggtttgtgggcaaccatcttacacagtacctagtaacagagtagacaagtgtttattgaatggatggatgaatggatgtgtggaagaggctttcagaaacaattcccttcatagactaaggccaatgttacttttgcttagctctttagtttgaaataatttaaaatgtacagaaaagttacaagaataatacatggaacttgcacacaccctttacccagattcacaaatgtttaacattttgcaattttgtttttcattttcttttctttatatacacacttctgttacttattttctatttgaaaattagttgcagacatcacatccctttacctctcaatactttagtacacatttcctgtgaataaagatatcttttacataacagacacttcaaattgataaagcacatttccataatttacaactggtattccagttgtatcaaccaatgctgtcatttatagcattttcttctttgaagtacagggatctagtacaagtaactacttgtcctgcttctttcatttccttgaatctggaccttcatcagatggtaactttaagcacccaaaggtttttttctggtttctcctctgtgtagtttaagaccatgcaaacatcttgctactcatcaaaatgccccccatataacatccaaattaatctttatcatgatggtttatgactgtctcctcacattgggattggggcccaactgattattaacaatctacttttttggaagatataatatctcttcctgggaataagataatgggcataacatataataattcctaattgtatcatgacaatcacaatccaaaatactaaatctgtgatgtgtctaaatctcttttccccattgtttttgcaggcatcaatggctatgtttttgatagtttgcagttgtcagtttgtttgcatgaggtggcatactggtacattctaagcattggagcacagactgacttcctttctgtcttcttctctggatataccttcaaacacaaaatggtctatgaagacacactcaccctattcccattctcaggagaaactgtcttcatgtcgatggaaaacccaggttagttattatatttttcttgtaccaacagctgtgaatgcttcactagccattcgtatgctcttttgcccactagctcacatgctgtcatttatagcattttcttccttgaggtacagggatctagtttctcctctgagtagttattattttcacccttgcaactaataaacagtttgaaggatcacgtagtagttctatttttagttttttgaggaacctccttactcttttccacagtatttgtacttatttacactcccaccaacagtgtacaagcattccccttttgccacatcctcaccagcattttttaattattttgtctttttgataaaagccatttaactggagtgaaatatctcattgtgcttttggtttgcatttctctggtaattagtgatgttgagcagtttttcatatacttgttggccatttgtatgtcttctttttttttttttttttttttttttcagacggagtctcgctctgtagcccaggctggagtgcggtggcacgatctcggctcactgcaagctccgccacccgggttcacgccattctcctgcctcagcctcccgagtagctgggactacaggtgcccgccaccacacccagctaattttttgtatttttagtagagacagggtttcaccgtgttagccaggatggtctcgatttcctgacctcgtgatccacccgcctcggcctcccaaagtgctgggattacaggcgtgagccaccgtgcccagcctgaatgtcttcttttgagaaatgtctattcagatctttgtccatttttaatagggttctttgttttttttgctattgactagagtttcttatatattctggttattaatgccctctcagttgtatagtttgcaaatatttcatcccatcctataaattgtctcttcactttgttaattgtttcctttgctgtccagaagctttatggcttgatataatcccatttgtctacttttgctttagtcccctgtgcttttgaggtcttacctgcaaaatctttcccagaccaatgtcctggcgcattcccccaatgttttcttccagtagtttcatactttcaggttgtatattttagtctctaatccattttgatttgatttttgtatatagtgagagataggggtatagtttcattcttctgcatgtggatatccagttttcccacaccatttattgaagagactattctttcaccagtgcgtgttcttggcactttgtcaaaggtgagttggctataaatgtgtggatttatttctgggttttctgtcgtgttccactggcatatatttctggttttatgccagtaccgtgctgtttttgttactacagctttgtagtatagtttcaagtcaagtagtgtcatgcctccagctttgttcattttgctccagattatttagctgtttggagtcttttgtggttccacacaaattttaagattcttttttctatttctgtgaaaaacttcactggcatttggataggtattacattaaatctggtagcattgatattttaacaatattagtttttccagcccattaaaatgggatagataccttttcagttttttgtgtgttcttcaattccctttatcagtattttagttttcattatagagatatctcagctctttggtttaatttattccaatatatttatttttattatagctattgtaaatgatttttaaaaaatttctttttaggttgttagctcttggtatatagaaatgctactgatttttgcatgttggttttgtatcctgcaactttactgaatttgtttatcagttctaatagttttttgatggagtctttagttttttgtgaaatataagattatgtcatctataaacaaggagaatttgacttcttcctttccaatttgggtaccctttatttctttctcttgcttacttgttctggcttggacttccaggactacattttatagaattggtgaaagtgggcatccttatcttgtttcagatcttaaaggaaaggcttttggttttccacatttggtatgatattagccgtagtttgtcatatatggcatttattgttttgaggtaagctttctatacccagtttgtttagagttttctcatgaagggatgttgaatttaatctttttggcatcaattgaaatgatcatttgtttttgtccttcattctgttgatatgatgtatcacattgattcatttccatatgttgaaccatccttgcatccctgggatgaatcccccttgatcatgatgaatgatcttttactgtgttgttgaatttggtttgctagtagttcgttgaggatttttgcatcaatgttcatcagagatattggcctgtagtttctttttgtgtatgtgtgtgtctttgtctggtttggtttcagggtaatactggccttgtggaatcagtttggaagtatttttcccccttgatttttgggatagtttgtgaagagctggtattagttctttttttttattattatacattaagttttagggtacatgtgcacaatgtgcaggttagttacatatgtatacatgtgccatgctggtgtgctgtacccattaactcgtcatttagcattaggtatatcgcctaatgctatccctctccccttcccccaccccacaacagtccccagagtgtgatgttccccttcctgtgtccatgtgttctcattgttcaattcccacctatgagtgagaatatgcagtgtttggttttttgttcttgcgatcgtttactgagaatgatgatttccaatttcatccatgtccctacaaaggacatgaactcatcatttttatggcggcatagtattccatggtgtatatgtgccacattttcttactccagtctatcattgttggacatttgggttggttccaagtctttgctattgtgaatactgccgctataaacatacgtgtgcatgtgtctctatagcagcatgatttatagtcctttgggtatatacccagtaatgggatggctgggtcaaatggtatttctagttctagatccctgaggaatcgccacactgacttccacaatggttgaactagtttacagtcccaccaacattgtaaaagtgttcctatttctccacatcctctccagcacctgttgtttcctgactttttaatgatcgccattctaactggtgtgagatggtatctcactgtggttttgatttgcatttctctgatggccagtgatggtgagcattttttcatgtgttttttggctgcataaatgtcttcttttgtgaagtgtctgttcatgtccttcgcccactttttgatggggttgtttgtttttttcttgtaaatttgtttgagttcattgtagattctggatattagccctttgtcagatgagtaggttgcgaaaattttctcccattttgtaggttgcctgttcactctgatggtagtttcttttgctgtgcagaagctctttagtttaattagttcccatttgtcaattttggcttttgttgccattgcttttggtgttttagacatgaagtccttgcacatgcctatgtcctgaatggtattgcctaggttttcttctagggtttttatggttttaggtctaacgtttaagtctttaatccatcttgaattaattttagtataaggtgtaaggaagggttccagtttcagctttctacatatggctagccagttttcccagcaccatttattaaatagggaatcctttccccactgcttatttttctcaggcttgtcaaagatcaggtagttgtagatgcgtggcgttatttctgagggctctgttctgttccattggtctatatctctgttttggtaccagtaccatgctgttttggttactgtagccttgtagcatagtttgaagtcagggagcgtgatgcctccagctttgttcattaggcttaggattgacttggcgatgcgggctcttttttggtttcatatgaactttaaagtagttttttccaattctgtgaagaaagtcattggtagcttgatggggatggcattgaatctataaattacattgggcagtatggccattttcatgatattgattcttcctacccatgagcatggaatagtcttccatttgtttgtatcctcttttatttccttgagcagtggtttgtagttctccttgaagaggtccttcacatccgttgtaagttgtattcctaggtattttattctctttgaagcaattgtgaatgggagttcgcttatgatttggctctctgtttgcctgttattggtgtataagaatgcttgtgatttttgtacattgattttgtatcctgaggctttgctgaagttgcttatcagcttaaggagattttgggctgagacaatggggttttctagatatacaatcctgacatctgcaaacagggacaatttgacttcctcttttcctaattgaatacactttatttccttctcctgcctaattgccctggccagaacttccaacactatgttgaataggaaaggtgagagaaggcatccctgtcttgtgccagttttcaaagggaatgcttccagtttttgcccattcagtatgatattggctgtgggtttgccatagatagctcttattattttgagatacgtcccatcaataccaaatttattgagagtttttagcatgaagggttgttgaattttgtcaaaggccttttctgcatctattgagataatcatgtggtttttgtctttggttctgtttatatgctggattacatttattgatttgcatatattgaaccagccttgcatcccagggatgaagcccacttgatcatggtggataagctttttgatgtgctgctggattcggtttgccagtattttattgaggatttttgcatcaatgttcatcaaggatattggtctaaaattctcttttttggttttgtctctgcccggctttggtatcaggatgatgctggcctcataaaatgagttcaggaggattccctctttttctattgattggaatagtttcagaaggaatggtaccaattcctccttctacctctggtagaatttggctgtgaatccatctggtcctggactcttttcggttggtaagctattgattattgccacaatttcagagcctgttattggtctattcagagattcaacttcttcctggtttagtcttgggagggtgtatgtgtcgaggaatttatccatttcttctagattttctagtttatttgcgtagaggtgtttgtagtattctctgatggtagtttgtatttctgtgggattggtggtgatatcccctttatcattttttattgcatctatttgattcttctctcttttcttctttattagtcttgctagcggtctatcaattctgttgatcctttcaaaaaaccagctcctggattcattaattttttgaagggttttttgtgtctctatttccttcagttctgctctgattttagttatttcttgccttctgctagcttttgaatgtgtttgctcttgcttttctagttcttttaattgtgatgttagggtgtcaattttggatctttcctgctttctcttgtgggcatttagtgctataaatttccatctacacactgctttgaatgtgtcccagagattctggtatgttgtgtctttgttctcattggtttcaaagaacatctttatttctgccttcatttcgttatgtacccagtagtcattcaggagcaggttgttcagtttccatgtagttgagcggttttgagtgagtttcttaatcctgagttctagtttgattgcactgtggtctgagagacagtttgttataatttctgttgttttacatttgctgaggagagctttacttccaactatgtggtcaattttggaataggtgtggtgtggtgctgaaaaaaatgtatattctgttgatttggggtggagagttctgtggatgtctattaggtccgcttggtgcagagctgagttcaattcctgagtatccttgttaactttctgtctcgttgatctgtctaatgttgacagtggggtgttaaagtctcccattattattgtgtgggagtctaagtctctttgtaggtcactcaggacttgctttatgaaactgggtgctcctgtattgggtgcatatatatttaggatagttagctcttcttgttgaattgatccctttaccattatgtaatggccttctttgtctcttttgatctttgttggtttaaagtctgttctatcagagactaggattgcaacccctgcctttttttgttttccacttgcttggtagatcttcctccatccttttattttgaggctatgtgtgtttctgcacgtgagatgggtttcctgaatacagcacactgatgggtcttgactctttatccaatttgccagtctgtgtcttttaattggagcatttagtccatttacatttaaagttaatattgttatgtgtgaatttgatcttgtcattttgatgttagctggttattttgctcgttagttgattcagtttcttcctagcattgatggtctttacaatttggcatgattttgcagtggctggtactggttgctcctttccatgtttagtgcttccttcagaagctctcttaggtcaggcctggtggtgacaaaatctctcagcatttgcttgtctgtaaaggattttatttctccttcacttatgaagcttagtttggctggatatgaaattctgggttgaaaattcttttctttaagaatgttgaatgttggcccccactctcttctggcttgtagagtttctgccgaaagatcagctgttagtctgatgggcttccctttgtgggtaacccgacctttctgtctggctgtccttaacattttttccttcatttcaactttggtgaatctgacaattatatgtcttggagttgctcttctcaaggagtatctttgtggcattctctgtatttcctgaatttgaatgttggcctgccttgctagatttggcaagttctcttggataataccctgcagagtgttttccaacttggttccattctccccatcactttcaggtacaccaatcagttgtagatttggtcttttcacatagtcccgtatttcttggaggcttcgtttgtttctttttattcttttttctctaaacttatcttcacacttcattttattcatttcatcttccattgctgataccctttcttccagttgatcgcattggttactgaggcttgtgcattcatcacatagttctcgtgccgtggttttcagctccatcaggtcctttaaccacttctctgcattggttattctagttgtccattcgtctaattttttttcaaagtttataacttctttgccattggttcgaacttcttcctttagctcggagtagtttgatcttctgaagccttcctctctcaactcatcaaagtcattctccatccagctttgttccattgctggtgaggagctgcattcctttggaggaggggaggtgctctgattcttagagtttttggtttttctgctctgttttttccccatctttgtggttttatctacctttggtctttgatgatggtgacgtacagatgggttttcggtgtggatgtcctttctgtttgttagttttccttctaacagtcaggaccctcagctgcaggtctgttggagtttgctggaggtccactccagaccctgtttgcctgggtatcagcagcagaggctgcagaacagcagatattggtgaactgcaaatgctgctgcctgatcattcctctggaagttttgtctcagaggagtagctggccatgtgaggtgtcagtctgcccctactggggggtgcctcccagttaggctactcaggattcagggacccacttgaggaggcagtctgcccgttctcagatctcaagctgcgtgctgggagaaccactactctcttcaaagctgtcagacagggacatttaagtctgcagaggttattgctgtcttttgtttgtctgtgccctgcccgcagaggtggagcctacagaggcaggcaggcctccttgagctgtggggggctccacccagttcgagcttcccggccgctttgtttacctactcaagcctgagcaatggcgggcacccatcccccagccttgctgccaccttgcagtttgatctcagactgctgtgctagcaatgagcaaggctccatgggcgtaggaccctctgagccaggtgcaggatataatctcctggtgtgccgtttgttaagcccgttggaagagcgcagtattagggtgggagtgacccgattttccaggtgccatctgtcacccctttctttgactaggaaagggaattccctgaccccttgtgcttcctgggtgaggcgatgcctcgccctgcttcggctcacgcacagtgcactgcacccactgtcctgcacccactgtccggcactccccagtaagatgaacccggtacctcagttggaaatgcagaaatcacccgtcttctgcatcacttatgctgggagctgtagactggagctgttcctattcggccatcttggctcccaatgcaaagaccttcaaacaacgtgacttcattttctcactcctaccttttgtgctcttgtcatttatttgaattctacatatattttaaaccccataagacattattattgttttatataatcaatatcatttatatatatatatatatttacacctttcatttctttcattcttttctgcatttcttgcttccatctatgatcattttctttttgtctgaagaaacttctttggaacttccttcagtgtgtgttggctagtaaaaagttctctgtcagtttttggtcagaatgggtctttattttgcctagatacaagtccttggttggatttacatattgtgaatgttttctcccagtctgtggtttgtcttttcactcctttaagggtgcattatggttaatagaagttcttacatttaattaattcttatttttcagttttttatggttaatgccttttgtattctgtttcagaaatttttgcctatcctaagaacatgatgccatccttctatattttctttctacatattttaaatattttcttctagaagtctgattgctgtgttgttcacaattaagtttatgattcatttttaattaattttgatggagtgatgcagataaaagttcatttttccatatggatatttaattgctctagcaccaattgttggaaaaaaataatttcctcactgaattgcactgttgtctttgccatgaatctgatgactgtatcactgtagctttgtttctgtactctatttcaggggtaggttatgatccacaagccaaatttgcagcttgtttttatatggcattgagctaagaatttttttacatttttaaagaattgtcacacaaaacaaaaaaaaagcaaaaaaacaaataaggatatgtatcatggaccatatgtgtctacaaacctaaaatatttactatgttgctttttacagaaaaagtttgccaacccctgatctcttatattccattgacttattggtctatctttgtaccagtaacatactatcttatagtaagttttaatatttgttagtataattcctccaactttgctctctttgatttttatataaattttagaatcatcttgtcaattttatcaataaaaatatcttctgaggttttgatagggattacattgattctgcagatcaatttgggggagcatacctcttgacaatattgagtattcctgtccatgagcatggtttagttatttatttacatcttttaaattttctcttggcaatgtttttgtaaaattttagtgtacaggtcttgcacatttttgtaaagtgtattctttggtatttaatgctattataatattttttatggtatcagtttttgtcaattgtgtttttctagaaatatgtccctttcatctaagttgtttaatttacttgaagtaagttatttgtaatgttcttttatcatccttataatgtctgtactgatgtctccgttttcatacctgatattgttatttatattttatctattttaagtttatcgcctgcacccactaactcgtcatctagcattaggtatatctcccaatgatatccctcgcccctccccctagtgcacatgtaccctaaaacttaaagtataataaaaaaaaaaagtttgtcgcctttgttataggttcatcaaatttactaatcctaccataggatcaaatttttgctttgttcatcaggtcatggaattaaaaaaatttttttgttttgtttattttctatgttgaatttttatttttattttgctttgcatttcatttatttctggtcttttgttattattccaatactttctctggattcagttttctttttcttcttgacttcttgagattaaaacttggttcattgattttcaacatttcttactttttaaaagttcatacaaagcataaatttccctttatatactgctttaaccccatatcacaaattttgatgagtcatatttttattatcattgagtttaaaatattttataaattttacgttatttcttgttttattcatagttattttacagtgttttacttaatttcccaatatatggcgattttctggctctctctctgttgctgatttatttgttttactgtgatcacataacatactctatattatttcaatcatttgaaatttgttgagacttgctatatgcccagtgaataatttaatttgattaatggcccactgcatttgaaacaaatatgtctttgctgttattgggtagagtgtcatatatttgcctattatgtcaagttgctttatcatgtttttaaaatccttataaacttcctgatattttatctgtttcttacagacatggaggaaactgtgacatctctgtgattgttgagtttgttattttgatttttgtatttgttagtaagaatgtttcaaaataaatgaggcaatataaaatcaggtgcttacaactttaaggttgtattcttattaaatcaattctttcatctttgtgaaatgtcctttttgtctgaagtagtacttgttgccttaaacgtctgcattgtctaaaatttatacacctgcactatcatatttattttgcttaatgtttgtgtggtatatatttcccattcttttcttttcaacctatctctatccttatatttacagtgtgtcttttttaacattttctgtagtgcaagtctgttggttaattaattttgtcagtttttgcttctctgaaaagtctttatttctgtttttgaattatatcttcactgtgtatagaattctgggtttgtggttgttgtttttgttttattacattttgttttattggtttttccctcagcactttaaaaatgccgctccattgtttctacttgcatagtttttcacaataagtttgttgtaattcccatttgcattcaactgtacataatgtatctttttaaaaaaatctggatggcttcaagctctttactttgatttttgtgtgtgtgtgtgtgtgtgtgtgtgtgtgtgtgtgtgtgtgttactttggcattctctaggcttattcaatctgtaatttggtatcattaattttgaaaaatatttatcatctgtgtcttcaaatattgcttctaattctttctcttcttctggtattgcatttacatatattatactgttcaattttgtcacacagctcttgaatatgctgttctagtttgttttctaactatttttccttctagttgttcagttttgttgacatttattgacctatttttacttcagtaattgtttcctgggttgttgagttaattgatgaactcatagatgacatacaatttatctttttattcttgtgtcacttgtgcttttgatgtcacatctaggaaggctttgtctagcccaaggccacatttacttccatattttcttctaagagtttgatagttgtagctgttacatatatgtctatgatctagtttgaataaatttttgtgtatggtgtgaagaagaggtctaacctcttttttattttttgcatgtaaacatccagttgtcccggcaccatttgttgaaaatatgattcttttcccattaagtcatcttgacacccttgttgaaaatcaattgaccataaatgtgagagtttatttctgaactctccattctgttccattgacccatacgtcttctataaattcttatagctaattctacattagactttggtttttcagatgtggtcatctcattagattatggtgatatgtttggttacaagttttatcttctccttggcaacattttttttattactgctcttcttttattcgtttttgttgttcctttctctttttgtgagacagggtctcactctgttgcccagggtggagtaagtggtgtgatcatggctcactgcagcctcaacctcctgggctcaagcaatcctcccacctcagcctcccaagtagtgggactacaggcatgcaccatcatgccaggctaacttttttattttttgtagagacagggtcttgctttgttgcccaggctggtcttgaactccaagctcaagcaatcctccaacctcagcttcccaaagtgctgggattaccagtatgagccactgcacctggccttgttgttcctttcttccttttatcttgtagtatcttgatcctttttgcttattatttatcattgaggtgagtttgttctaaataaacttttcgcagaaagtttatgtagatatattaatatcaatgaggcattaggagtgagttttagattagcaggaattctcttatgaaaggtattgattgtatgtgtgagttttcagcctttacttctctccagcccatcaagatcaaagctgcagagttgtttacatttcagaatttctttcctcccctccccaccttgcaaaacagacttacagtgcaaaaatgacttgtcaatgtgattctttcttctggtcccatctttcctaccttttgagacttgtgttgaaaggagtccagtaaaaccaccgatgctagcttgtataccctgatcccattgttataatgaatgactgactgtttttcatatcaaagtataatacttgcaccttgatagaagaaagaaacaaggccaggcacagtggttcatgcctgtaatcccagcactttgggaggctgaagtaggaggaataattagactttgatattaaaaatggggaagatatggcggtataagatatgaggaagtatgtcttcttggacttttctgaaatctgccagccatgagcatccactctttttatcttttgatacctgttttatattaactatacttctattttgtggtttcatggcttcagatatcttccagcttaattgtactctgtctttaattatttgcagcaatttctgaaaggagcaagaagaaaggccagccctttcttcactaccttaaaaactggtcatcttttgaaaccccatgaaaggcacagtgggtgaccatctacatcaggagtgggcaaactatggcccttgggtagtctggtctctgtccgtttttgtaaggttttattggaacccatacacacacaaactgatcatctcttgttatgtgttaagttttcttataattattcttttctatttcatccagctgaattaccatttcaccttgtgtatgccctttccagtcttaaattatagaagctatgtctttgtggttttaaattatggaagctgtgccttcttgtgttttagtatggcaagatatttgttcttacttttcctctagaatctgcagtggattactttcagaagtaggtattgcctctaagtttcctgacttctgtttccttctccctgttctgtagtatatttatagattgcatgttttctcgtccttaaacaaggtacaaatatgttctgatcaaggtttgctagccgagaggataagtggcttgctcttagcctaactctctgtctacttaatggatgtcgaattcccttctcaactcaacagctagtaactagttccaagatcggataatagcttacagaattaattagttcagtgaaagccctggtttgatcacagaggcaggagactgatctatatatttgtagtgctgactagaccccaacttggccagatagcttatacctatgtcagaagttggaggaggagattgacagctgaggtgtctccaagggaattacaattattttcattttctttgtgtctgtaattatgtctcttttcttacttcaaattttgtatatgtgaaatttcttaatttttatttggttatttattttattgactttttcatcaaacaaccaactctaagttcttggattgaaatttatgaattaattataatgttttaaatttaccattagtcacacatacaatacaaaaagatattttcattacaaaattttaacccaagccattaaaactaaactccagcttggtcaccattcctaataccaggcccctctcagaggggagggtaaataaaagtccattttggtaactagtttgacgagaatctctaattgtttccctgtttttcttataatgtctgcctttgaattatcctctttttttcaagagttccatcatataatgtattcctttttgcttacagattgacctcctagaggcatgcatccccctgctccagtctgagctggttctctctaggcctgaggctcagttatcaacttgggacttttatttaccctccctcaggataggtacctggttcttggataccaggtcttactcttgtttgagatactcctttattttggtggcaaacattccataatcacttcctgataatggtgacatttgaggtagattttctgagtctttatatgttagaatatgtttttattctcctttgccacttgattgataatttggctgcacatagaatgtaagcattcacagggcttttgggagcagcttcccttgagaagaaggtggatgcagttaagatcttccctgaaaagactgtgtgaaatgacaaggctattgaggtacccaacgggtagcttggtaaaggtgtatcttgtctcttatgtttatgcatctactttaccaccatgtaattagcctattataacttgttgcattccttcactcagctaatcttgttcatggtagaaattaatattgctagtaccatggtagaattttatattagctggatcctagacctaaatgctccttccttgtgcttacatattctgcaagtgggtgacagtggatgctaggtattgtgttatgtgatttcaatgtattatatgatggggtagatactattagcctcatttgaaaattagaaacctattgttcagaaagtttaagtgactttctcaaagtcacacagctggtaaatggtagaactgggatttgaatccaggcaatctgatggatttaagaggaacctgtgccactatgtgatatagcaataacatctagccaatataaatactttcctgaattaaatcactgtcatattcagagagttctgtgtcactattaagaccctccattattgtgtatattaattacatttccctattttaatcccaatatctattcatttttatcacagtcctttcttatggtcacaaacaggcatagtacaacagcagcaatgcaaaaaccacttttatattacatgttccagggatttaacccaatgacctgtgatataatgatactgactagtattttttcatttatctgggaatgggagagaacctctaacagaacgttttagaatctgtgttatgagtaaccagagtcttattcttcctcatctccaggtctatggattctggggtgccacaactcagactttcggaacagaggcatgaccgccttactgaaggtttctagttgtgacaagaacactggtgattattacgaggacagttatgaagatatttcagcatacttgctgagtaaaaacaatgccattgaaccaagaagcttctcccagaattcaagacaccctagcactaggcaaaagcaatttaatgccaccacaattccagaaaatgacatagagaagactgacccttggtttgcacacagaacacctatgcctaaaatacaaaatgtctcctctagtgatttgttgatgctcttgcgacagagtcctactccacatgggctatccttatctgatctccaagaagccaaatatgagactttttctgatgatccatcacctggagcaatagacagtaataacagcctgtctgaaatgacacacttcaggccacagctccatcacagtggggacatggtatttacccctgagtcaggcctccaattaagattaaatgagaaactggggacaactgcagcaacagagttgaagaaacttgatttcaaagtttctagtacatcaaataatctgatttcaacaattccatcagacaatttggcagcaggtactgataatacaagttccttaggacccccaagtatgccagttcattatgatagtcaattagataccactctatttggcaaaaagtcatctccccttactgagtctggtggacctctgagcttgagtgaagaaaataatgattcaaagttgttagaatcaggtttaatgaatagccaagaaagttcatggggaaaaaatgtatcgtcaacagagagtggtaggttatttaaagggaaaagagctcatggacctgctttgttgactaaagataatgccttattcaaagttagcatctctttgttaaagacaaacaaaacttccaataattcagcaactaatagaaagactcacattgatggcccatcattattaattgagaatagtccatcagtctggcaaaatatattagaaagtgacactgagtttaaaaaagtgacacctttgattcatgacagaatgcttatggacaaaaatgctacagctttgaggctaaatcatatgtcaaataaaactacttcatcaaaaaacatggaaatggtccaacagaaaaaagagggccccattccaccagatgcacaaaatccagatatgtcgttctttaagatgctattcttgccagaatcagcaaggtggatacaaaggactcatggaaagaactctctgaactctgggcaaggccccagtccaaagcaattagtatccttaggaccagaaaaatctgtggaaggtcagaatttcttgtctgagaaaaacaaagtggtagtaggaaagggtgaatttacaaaggacgtaggactcaaagagatggtttttccaagcagcagaaacctatttcttactaacttggataatttacatgaaaataatacacacaatcaagaaaaaaaaattcaggaagaaatagaaaagaaggaaacattaatccaagagaatgtagttttgcctcagatacatacagtgactggcactaagaatttcatgaagaaccttttcttactgagcactaggcaaaatgtagaaggttcatatgacggggcatatgctccagtacttcaagattttaggtcattaaatgattcaacaaatagaacaaagaaacacacagctcatttctcaaaaaaaggggaggaagaaaacttggaaggcttgggaaatcaaaccaagcaaattgtagagaaatatgcatgcaccacaaggatatctcctaatacaagccagcagaattttgtcacgcaacgtagtaagagagctttgaaacaattcagactcccactagaagaaacagaacttgaaaaaaggataattgtggatgacacctcaacccagtggtccaaaaacatgaaacatttgaccccgagcaccctcacacagatagactacaatgagaaggagaaaggggccattactcagtctcccttatcagattgccttacgaggagtcatagcatccctcaagcaaatagatctccattacccattgcaaaggtatcatcatttccatctattagacctatatatctgaccagggtcctattccaagacaactcttctcatcttccagcagcatcttatagaaagaaagattctggggtccaagaaagcagtcatttcttacaaggagccaaaaaaaataacctttctttagccattctaaccttggagatgactggtgatcaaagagaggttggctccctggggacaagtgccacaaattcagtcacatacaagaaagttgagaacactgttctcccgaaaccagacttgcccaaaacatctggcaaagttgaattgcttccaaaagttcacatttatcagaaggacctattccctacggaaactagcaatgggtctcctggccatctggatctcgtggaagggagccttcttcagggaacagagggagcgattaagtggaatgaagcaaacagacctggaaaagttccctttctgagagtagcaacagaaagctctgcaaagactccctccaagctattggatcctcttgcttgggataaccactatggtactcagataccaaaagaagagtggaaatcccaagagaagtcaccagaaaaaacagcttttaagaaaaaggataccattttgtccctgaacgcttgtgaaagcaatcatgcaatagcagcaataaatgagggacaaaataagcccgaaatagaagtcacctgggcaaagcaaggtaggactgaaaggctgtgctctcaaaacccaccagtcttgaaacgccatcaacgggaaataactcgtactactcttcagtcagatcaagaggaaattgactatgatgataccatatcagttgaaatgaagaaggaagattttgacatttatgatgaggatgaaaatcagagcccccgcagctttcaaaagaaaacacgacactattttattgctgcagtggagaggctctgggattatgggatgagtagctccccacatgttctaagaaacaggtatgaatgcattggttattcctttgctctgctcttgtgacatttgactttaccagatgatgacaccaacaatgagagttagaggatgaaaaatcaaggtgtcttgaaactcttactctggtgagatagagagaagagaggtttacaagagggtagaggaatcagggacaagaaggagcaatggggagcaggaagaaagtcaacctcacctatcaaccttatgagctgcaggggaaatcttagtctcatcagagaactttaagcaaggcagaaggaagaagcaagttcgtgttaaagaggttaaggacttggggaggattggttttcatgatactggggatccagagggcaaagtaggatgattttatttttaggtgagtagagggaggttgagcagtcaagtagtacagagaaatgtggaatataaacataaggagagtcagtcagtcacaaatatttatggaacacctactacatgccagacacttttgtacacattggagtgcagcacagcaggagcttatattctattggaaagagcaagagacaagttagtacaaaactaaataaggcaatctcaattgtgttgttcagaagatagaatagaataatatggtagagagaataatatgatagagtaatacggtagagtgttacattagctgtggtggtcatagaaatcatctttgaggagttgagacctaaatgatgataacaggccagctgatggagctctgagagaagatgtttccagacagagggaagagaaaatgcaaaggccctgagaatggaaaaagtttaccatgtttgaggaacaagaagggacaagcatgacttgtcactttcccaccttgctttctagctcaagtaagcccttattgctgcattgcaaccatagactatttccctagtccactgactttctcattctcctggacctctatcttagattttctgtgttttccttaaatctcgagcaccttttttccattctccaatgcccattttcactcttagctgatgctgtgcaatgaacctccacagactcccaacatcacatttactggcatttgtacccatatactctgcctgcacacttattacaataaatagagtgtctgtgctcctaaggccaacctctccagttttgtacttgattcccatctcttctcccttcataaaaaatgttgctccagcaatttctccttttctcccttacatcatcaatttatctctccactagattaatctcatcaacatcaatcatgctattatttcctcccctatctttacagaaaccgtcttaaaataattgtccctgcttgcagcctttgcatcttttcctgccattctctcctctttaacccactccaaagaagcttttatctctattatttcataagaactacattttcaaggtcattattgatctttacattactgattactagccctcatcttatttgaattctcagtagtatttgagaggtgattactccatcgttgatacaggttctcacttggtttctctaacaccacttttcttcacttttctactaaacttactgccaatctttgtcaactttgcgagtccttcttcatccccctaatctttaaaggttagagtgctccagggattagttctccaacttcttctttattctatttatactcactctgtgacgacattgtttagcctcatgattttaagtactatctatctgcagataattccagttgaatatctggagatattctcagatctctctcctgaagtcaaaatttacatatcaactccctaccttaacatgcacacaattagactcttaattcctgccccttcccaaaacctgctgattgctcagccttctccatggcaatcaaaaaccattcctggccgggcatggtggctcactcctgtaaccccagcacttggggaagctgaggcaggtggattggttgagccccagagttcaagatcagcctgggcaacatggcaaaacctcatctctattaaaaatacaaaaattagccaggcgtggtggtgcacacctgcagtcccagctactcaggaggctgaggcacgagaatcgcttgaactggggagacggaggttgcagtgagctgagatggcctcactgcactccagcctgggcaacagagtcagacttgatctcaaaaaaataaataagtaaaaccattccctatttcagttattcagtcacagatcttgaagttttccaactctttttttcttacattaacatctaatctgtaaaggatcctgtattagtccattttcacactgctaataaagacatacctgagactgggcaatttacaaaagaaagaagtttaatggactcacagttccacatggctggggaggcctcacaatcatggcagaaggcagggaggagcaagttatatctcacatggatggcacaggcaaagagagagagcttgtgcagggaaactcctctttttaaaaccatcagatcttgtgagacttattcactatcatgagaacagcaagggaaggacctactgccatgattcagttacctcctatcaggtccctcccacagaacatgggaattcaagatgagatttgggtagggacacagccaaaccatatcattccaccccatcccctcccaaatctcgtgtcctcacatttcaaaaccaatcatgccttcccaacagtcccccaaagtcataacacatttcagcattaactcaaaagtccacagtccaatgtctcatctaagacaaggcaagtcccttccacctatgagcatgtaaagtcaaaagcaagttagttacttcctagatacaatggggtataggcattgggtaaatacagccattccaaatgggagaaattggccaaaacaaagggcctacaggccccatgcaagtctgaaattctacggggcagtcaaatcttaaatctctaaagtgatctcctttgactccatgtcttgcatctgagtcatgctgatgcaagaggtgggtgcccatggtcttgggcagctccacccctgtggctttgcagggtacagcctcccttgtgtctgccttcatgggctggcattttctgtagcttttccagatgctggtgcaagtttctgatggatctaccattccggggtctggaggacggtggccctcttctcacagctccactaggtggtaccccagtagggactctgtgtgggtgccctgagcccacatttcccttctgcactgccctagcagagtttctacatgaaggcccacccccgcagcaaacttctgcctgggcatccaggcacttccattaatttctaaacaacaaagcattcaagaggcgacttgggtgctattaagggcattcagtttcataagggaagcagagcataaaagtttggaaaatttgcagcctgataatgttagagaaaagcaaatcccattttctgaggagaaattcaagcaggctgcagaaatttgcataagtaatgaggagccgaatgttaatccccaagacaatggggaaaatgtctccagggcatgtcagaggtcttcacaccagcccctcccatcaccggcccagaggcctaagaggaaaaagttgtttcatgggctgggcccaggatccccatgctgtgtgcagcctagggagtcggtgccttgtgtcccagccgctacagccatggctgaaaggggtcaatgtagagctcaggctgtggcttcatagggtacaagtcccaagccttggcagcttccacatgatgttgagcctgcgagtgcacagaagtcaagaactggggtttgggaacttccgcctagatttcagaagatgtatgaaaacacctggatgcctaggcagaagtttgctgcgggggtgggccctcatggagaacctctgctagggcagtgcagaagggaaatgtgggctcagagcacacacacagagtccctgctggggtaccacctagtggagctgtgagaagaggaccaccgtcctccaggccccagaatggtagataccctaaatcatctctttcaaattcgaagttccacaaatctctaggacaggagcaaaatgccaccagtatctttgctaaaacataacaagagttacctttgctccagttcccaacaagttcctcatctctatctgagaccacctcagcctggatttcattgtccatatcattatcagccttttggtcaaagccattcaacaagtctctagagagttccaaactttccacattttcctgtcgtcttctgagccctccaaactgttccaacctctgcctgttacccagttccaaagtcgcttccacatttttgggtatcttttcagcagcaccccactctactggtaccaacttactgtattagtctgttctcacactgctgataaagatatacctgagactgggaaatttacaaaggaaagaggttttatggacttactgttccacatggctggggaggcctcaaaatcatggcagaaggcaaggaggagcaagtcttgtcttacatggatggcagcaggcaaagaaagaaagcttgtgcaggaaaactcttttttttcttttcttctttttagacagagtcttgctctgtcacgcaggctggagtcagtggcgtgatcttggctcactgcaacctccacctcccgggttcaagtgattctcctgcctcagccttccaagtagctggtactacaggcatgtgccaccacatgagatgagattttggtagggacacagccaaaccatatcattccccctgtcccctcccaaatctcatgtcctcacatttcaaaaccaatcatgccttcccaacagtcccccaaagtcataactcatttcagcattaactcaaaagtccacagtatttttagtagagatggggtttcaccatattggccagactggtctctaactcctgaccttatgatccgcccgccttggcctcccaaagcactgggattacaggtgtgagccaccatgcccagccaaaaactcttctttttaaaaccatcagttctcatgagacttattcactatcacaagaacagcataggaaagatctgcccccatgattcaattacctcccaccaggtccctcccacaacacatgggaattcacgatgagatttgggtggggatcctcttggctatcatttcaaaaaatagtcagggttgattatggacttagtattgaataagatgaaaatgtactgaaatggaacgatgaagataattgaccagggaaagcaggttacaagccaagagaggatacagtgtcacttcagatgctataaaagtgatgtttttattttttgaatgttatttggctatattttcaaattatctgcactgcatatgcactgcttctgtaataataaaagggtattaaaataataaaatcaagtctataaatcacacacacacaccccagcctcttctctacacctcagtgactaccaaccacatctaaattatcatcatttctcatctgaattattgcaagaagccattgcaataattcagatgagagttgatacaaagccttcctgtttccaaccttaccctcatatagtcttttcccaacattgcatctaaagtaatttttcaaattgcaattctgatcactgttctctgcttcagatcctccagtggattttcatctcactcagtaaattccaaagccttcaccatggccttcaagaccctacgaaatttgaccctctgcaacctctctgccttcatctgttaccattgtctcctgttaatcctgcctcagccacactgacctccttgttcttctcaaatggactagatgtgtgcctatctctagaccattacagtttctgttctctctacttaaaattatgtccctgatactctaatgcaagttctcttacttccttcaggacgctgctcaaatttcattttatcagtgaggctttccctgaacactgtatgtaaatattgctcccaccattttttttcaatgcacttaacagtgcctgaaatattatatatttatttctttattgtctatcttctctgactataagttaagctcattaagaacacaaactttggaggtattgttcaatgttgtgtccccagaactttgaacagtgcctggcacgtggcagatgttcaaataaatgtatgttgaatgaattagaaaatgataaatgtagggagacaaaagcaggtctcccatttatatccaaactctaggactctaggaaagactgattatatggaatcgtgtcacacagcatccatgggcaagagtggaggcagagataccagttaagatgctattgcagtcatacagataaaagaagacagttatttagaccagtgtggtggtgacagaaatggaaagaaatggaaggatgttgggtataattaaagataagcatataagactggctgttaattgagtatgggaagaatgaggagagaggatgtaaagaacatttctttttgtttgtttgttttgttttgtttttgtttctttttattatactttaagttctagggtacgtgtgcacaacctgcaggtttgttacatatgtatacatgtgccatgttggtgtgctgcgcccattaactcatcatttacattaggtatatctcctaatgctatccctccctcttccccccaccccccaacaggccccggtgtgtgatgttcccctacctgtgtccaagtgttctcattgttcaattcccacctatgagtgagaacatacagtgtttggttttttgtccttgcgatagtttgctgagaatgatggtttccagcttcatccatgtccctacaaaggacatgaactcatccttttttagggctgcatagtattccatggtgtatatgtgccacattttcttaatccagtctatcattgatggacatttgggttggttccaagtctttgctattgtgaatagtgccgcaataaatatacgtgtgcatgtgtctttatagcagcatgatttatagtcctttgggtatatacccagtaatgggatggctgggtcaaatggcatttctagttctagatccctgaggaattgccacactgacttccacaatggttgaactagtttacagtcccaccaacagtgtaaaagtgttcctatttctccacatcctctccagcacgtgttgtttcctgactttttaatgatcgccattctaactggtgtgagatggtatctcactgtggttttgatttgcatttctctgatggccagtgatgatgagcatattttcatgtgtcttttggctgcataaatgtcttcttttgagaagtgtctgttcatatcctttgtataagattattagtggatttctcagaagaaatattgtagaccagaagggagtgaaaatatagatttaaaatcctgaaaggaaataaaaactagcaatgaaaaatactatatccagtaattttatctttcagaaatgaaggggtgataaagattttctcagaaagacaaaagctagatctgctttataagaaatgctagtaggagttcttcaagctgaagaaagaggatgcttattagtaatatgaaaacatatgaaaggataaaactcactagtaaaaataagtacattgtcaaatccaaaacactctagtagtgtaatggcagtgggtaaattaattatatctttagtataaaagataaaagacaaagaaagctattttaaaaactaaagctataataatgtgttaaggaatgcaaattattaaaatatgtaaactgtcacatcaaaaacataaaataggctgggcacagtggctcatggctgtaatcccaacactttgtgggggccaaggtgggaggatcacttgagcccaggcatttgagactaacttgggcaggatagtgagatctcatctctataaaaaatttaaaaattagtaaagcatggtggtgcatgcctgtagtcccagctactcaggaggtggaggtgggaggactgcttgagcctgggggggtcaaggctacagtaagcaatgatcacaccactacactccagcctgggcaacagagcaagaccctgtctcaaaaaaaataataatatgtaggaggaagggaataaaagtgtagagtttgtggatgcaataaaaattaagttgttatcagtttaaaatagcctgctaattttgtgtaagcctcatagtaaccacagagcaaaagcctatagtagatacacaaaacattttaaaaaggtccaaagcataccactacagaaagccatcaaactataaaggaagaatgcaacagaagaagaaaggatcaaaggatctaaaaaaaaaaaaagaaagaaagcaattaacaaaatgacacaagtatgaccaaagtccactgcttctttattactgatatagaatatctttcagatcttaagggactgattaattacttgggagagaaagtttgtgttgagaagatttgcttgtgttgcaatgagaaggggaagttctactcaacagaagctgtacaggcacatatgacaaaagctggtgtaagctttttacagatggtgatgctgctttggaatttgcagacttgtatgagtttaggagtagctacccagatcacaaggaaggggaggaccctaatgaggctgaggagtcgcccttaggaaaggacttagaatatgatgatgaaagcatggaactgattctgccttctgatgccagagtgggtcatcactccttgatgagatactacaaacagtgatttggcttgtcaagagctgtggtagttgctaaatattgtgaggccatgggccgagtgcttcagtaatagagagccctgggatagactggcaacacaggagcagctgttacatgaaagtgagacatgcattatatccaaaggatgaagtcaaaatggatgctgaagacagaaatgaagaacaatgccaccaagcagatgcactttagggtccaagtgagattctgagagtctgccaggattgagtgattgtctgctgcccaagtttcctccttgccctgaggaccagggaaagccagattgtatgatggacacttttgctgctacttcacttgctctaacataataataaaaatgaaaatctaaaaaatattttattgaagaatgaaggtgaaagaaatacattttcagacaagcataaacagagaaacttcaccattagcaaaagtccactaaaatattctaatgttatacttgagacaataaaaaagtgatacagaatggaaggcatgagagacaagatgggataaagagcaaacaaagttaaatatgtggataaatagagataagtatcataaaacatggtcaaatgttttatgagcgttaagatatatagaattgctttattcacagttggtttgctgtcataacacaagtatcatgaaaatcactgctaaatctaagccaaaattgggaaaggaaaaggttcatgtcactatcatcaacgttggacatgtagactcaggaaagttcaacactactggtcatctgatctataaatgtgatgtgatcaacaaaggaaccattgaaaaatttgagaaagaacctgctgagatgggaaagggctcatttgagtatgcttgggtcttggataactataaactgaacatgaatggaatatcaccattgatatctcctaaagaaacctgaggccaaaaatatcctgtgaccatcattgatgccccagcacacaggggctttattaaaaaaaaaaaaaaaaaaaaaaacatgattagagtgatatcaccaaaatggtggatagaagcaatctggcttcactctcctccagaaaaaccaaaaacaactattcagtgtctagcttatcaccaggaatatcccataactcaaaacagaggctgtgaggatctgagtggccacatagaagagaaaaactgcaagcagaagataacaaaaatgggcctgtttaactgcagcatccccttcccaagctgccaggcaccatgcagaaaagttcccccagactgacagtatgtacatcagaaaaagtgacatctagatgaagagccagctttcccaccatcttgggttcctttgcagaaaaatcattcctgcctcaatccgtgggaagcagcctgattgcctctagggtaaaaaaatcctgagggcagctagagacaaaggatggaggcggggctagcaaccccagcatgcaaaacacattggctgctcttcatctaagccaaagaagacaccaaatgagagagaatgttcagcccgtggttcctctggacacaaaatcctaaccagatgtctcacccaaccaggatatccagtttgggacctcccccaaatcgggaataggcagtaatccaagccgttgcaagagctgcagcaaatctgggcttacagcaccatctagtgccaaaaaagaggcagtaatctcagagtaaggaagctctaattcatacataacctttagacaggcatactcctgaaaaaccaaactaagccagacacaaagactggaataaataacttagcattcatacaaagacatagatatatgtgcataaaaaacaagagcaaatagggagctatgacctctccaaatggaaacagcatggagccagtgaccaaccctaatgagatggcaaattgtagctctcaaatcaataattcaaaataaaagttctgaggaaactcaaagaacacaaaaaagcaactgagaaatttatgagataaatttaacagagaaatcaaaataataatttaaaaaaccagaaatgctggagctgagaaatacaactgaacggaaaaaaaaaatgcactggaaagtctaaacagcggaactgatcaagcaaaacgaacaatcaatgagctcaaagacaggctatttgaaaatacacagtcaaaggacaaaaaataattaaaaggaatgaagaacacttgcaagatctagaggactgcctcagtagaacaaatctaagagtcatgggccttcaagagagaaagagcaatgaataaaaagctcaaagaaataacagaaaatatttccaaacctacagagagatgtaagtatccagttataggaaggctgaagatcaccaaacagattcaacccaaataagactaccccaaggcatacaataattaaactctcaaaggtcaaagacaaagaggggatcctaaaaagagcaagaaaaaagaagcaaataacatataaaggagctccagttcatccgggaatatactctggaccagatgaacctacctgacattttacagaacattttatccaactactacagaatatacattcttcttatcagcacatggaacattctccaggatagactatatattaggccagaaaacaagtctcaacatttaaaaaaataaaattatattaagtatcttttctgactacagtagaataaaactagaaatcaatgacaagaggaacgtttgaaactatacaaatacatggaaattaaacaacatgctcctgaacaaccaataagtcaatgaagaaattaagaaggaaatttattgaaacaaatgaaaatggaaacaacataccaaaatgaatgggatacaacaaaagcggtactaagagagaagtttatagctataaatgcctacatcaaaaaagaaagactcaaataaacctggtaatgatgtaactcaaggacatagaaaaacaagagcaaaccaaacccaaaattagtagaaggaaaataataataataatcatagaaataaataatattgagaaaaagaaaacaatatgaaagaccaatgaaatttttaaaatggctttttgaaagataaaatttaaaatctttagctagactaaggaaaaaaaatgagagaagacccaaataattgaaatcaaagatgaaaagagtcattaaaactgataacacaaaaatacaaagtttcactagaaactattatgatcaactatatgccaacaaactggaaaaactagaagaaatggataaatttctggacacatacaacttaccaagattgaactatgaggaaatagaaaacttgagcagaccaataactagtaatgagattgaagcagtagtaaaaagtctggcattaaataaaagtccaggacctgatgacttcactgctgaagaaaaacttacaccaattatactgaaactatttaatattgcaaaaaattgaagagaaaagaatgtttccaaactcattctacaagaccagcattatcccaatacccaaaccagacaaagacacaacaacagcaaaaagaaaactacaggccaacttcgctgatgaatatagatgcaaaaatcctcaacaaagtactagcaaactaaattcaacaacacattaaaatgagtatttgtcatgcccaagggggattcatcctaggaacacaaagatagttcaacatatggaaatcaataaatgtgatacaccacattaacagaaggaaagacaaaaaccatatatttatttcaataaatgtcaagaaagcattgaataaaattcaacatcccttcatgataaaaactctcaacaaatttggtttaaaggagcatacctcaaaacagtaaatgttatatatgacaagcccacagctaacattacaccaaatgggaaaaaattgaaagcctttcctctaagatctggaacaagacaagcatgcccactttcatcaattctattaaatgcagtcctggaagtccaagatggagcaattaagcaaagggccttcaaattagaaaaaaagaaatcaaattccccttgtttgtagacgatataatgttatatttagaaaaacctaaacactccaccaaaaaactgttagaactgatcaacaaattcagtagagttgcaagaagcaaaaccaacatacaaaaatcagtagcatttctatataccaagagctaacaatccgagagagaaatcataaaagcattttcattttcaatagctataataaaaataaatatctaggaacaaatttaaccaaagaggtgaaagatctctatactgacaactgtaaaaccctgatgaaaggaattgaagaagacacacaaaaaatgaaaaggtatctatcccatgttcatagaatggaagaattcatattgttaaaatatcaatactactagatttcatgtattacctatcaaaataccaataacatttttcacagaaatagaaaaagcagtcttaaaatttgtacagaaccacaaaagacccagatatggtttggctgtgtccccacccaaatctcatcttgaattgtagttcccataatccccacatgtcgtgggagggacccagtgggaagtgattgggtcatgggggcagttttcccccatgctgttctcgtgatagtgagtgagttctcatgaaatctgatggttttctaagtgtttggcatttcccctgctggcacttattcccactgccaccttgtgaagaagatgccttgcttcccctacgccttccaccatgattgcaagtttcctgagacctccccagcaatgcggaactgtgagtcaattatacctctttcctttatagattacccagtctccagcagttctttatagcagtatgagaacagactaatacagtaaattggtaccgaggtagggggggcactgctataaggatacctgaaaatgtggaagcaactttggaactgtgtaacaggcagaggatggaacagtttggagggctcagaagaagacaggaaaatgtggcaatgtttggaacttcctagagacctggagggctcagaagaagacaggaaaatctgggaaagtttggaacttcctagagaatcattgaatagctttcaccaaaatgctgatagtgatatggacaatgaagttcagactgaggtggtatcagatggagatgacgaacttgttaggaataggaataaaggtggctcttgctatgctttagcaaagagattggcagcattttgcccctgccctagagatctgtggaactttgaacttgagagagatgatttggggtatctggcagaagaaatttctaagcaacaaagcattccagagtgacagagcataaaagtttgaaaagtttgcagcctgatgatgcagtagaaaagacaaacccattttctggggagaaattcaacccagctacagaaatttatataattaacaaggagccaaatgttaatcaccaagataatggggaaaatgtgtccagggcatgttagagaccttcgcagcagcccctcccatcacaggcctggaggcctaggagggaaaaatgctttcgtggcctgggtccagggctcccctgcagtgttcagcctgggacttggtgccctgtgtcccagccactccagctataagaggccaaagtacagcttgggctatagcttcagagggtgcaagcccccagcctttgttctgtgggtgcacagaagacaaaaattgaggtttgggaatgtccacctagatttcagaggatgtatggaaatgcctggatgtccaggcggaggtgtgctgcagaggcagagccctcgtggagaacctctgctagggcagtgaggaaaagaaatgtggggtgggagcccccacacagtcaccactggggcactgcctagtggagctgtgagaagagggccactgtcctccagaccccagaatggtagatccactgagagcttgcaccgtgggcctggaaaagccacaggcactcaatgccagcccatgaaagcagccaggagcagggctgtaccctgcaaagctatgggggtggagcttcccaaggctgtgggagcctgccttttgtatcagggtgacctaaatgtgagacacggagtcaaaggagaacattttggaactttcaggtttaatgactgccctattggatttcagacttgcatggggcctgtagcccctttgttttggccaatttctcccatttggaatgagtgtatttacccaatgcctgtacccctattgtatctaggaaggaactaacttgcttttgattttacaggctcataaacagaagggattttccttgtctcagatgagactttggacttggacttttgggttaaggctggaatgagctaacactttgggggactgttggaaaggcatgattctgtttttaaatgtgaggacatgagatttgggaggggccatgggtggaaacatatggtttggctctgtgtccccacccaaatctcatcttgaattgtagtatattgtttgtaaaaattcctgcctatccagagattttttaaaaaaaaacaatactttcttcaattttctcttacaatttaattttttacatttaactttttaatacttcctgtagactaaaagttattttggtgcattgtgtgaaccaaagatcaaagtagttttatttttttctgaaaacatctattcattttttcaattaattgattgtttatattaaggatctaggaggatctaaaattatggaattgtgggcaagggcaatttttgccttacatttcatgtaaggcaaaataatccccatgtgtcatgggagggacccagtaggaagtgattggatcatgggggcaggttcccccatgctgttctcatgacagtgagtaagttttcatgagatctgatggttttataagcatctggcatttccccttctgtcacctctccctcctgccaccttgtgaaaaaggtgccttgcttccccttcaccttccaccatgattgtaagtttcctgaggcctctccagccatgtggaactgtaagtcaattaaacctctttcctttataaattatgcagtctcaggcagttctttataccagcaggaaaacagactaatacagaccctaaatatccaaagcagtcctgagcaaagagaacaaagctggaggcatgatgctactttatttcaaactatactacaaagctgtagtaaccaaaacagcatggtactggcataaagacagaaacatatgccagtggaacacaacagagaacccagaaatgaatccacacatttagagccaactcatttttgacaaagtgccaagaatatgcattggtgaaagaatagtctcttcaataaatgatgttgggaaaactggatatccacatgcagaagaattaaactaaacccctatctctcactgtatacaaaaattaaatcaaaatggattagagacttaaatatacaacctgaaagtatgaagctactggaagaaaacattggggaaatgctccaggacattggtctgggaaatattttatggcctgggaaatatcaaaagcacagacaactaaagcaaaagtagacaaacgggattatatcaagctataaagcttccgcacaacaaaggaatcaattaacaaagtgaagggacaacctacaggatgggatgaaatatttgcaaactatacaactgagagggtattaataaccagaatatataaggaactcaaacaagtcaatggcaaaaaagcaaaggatcctattaaaaatgaacaaagatctgaataaacatttctcaaaagaaaacatacaaatggccaacaggtatatgaaaaactgctcaacatcactaattaccagataaatgcaaaccaaaagcacaatggatatttcactccagttaaatgacttttatcaaaaagacaaaaaataatgaatgctgatgaggatgtggcaaaaggggaatgcttgtacactattggtgggagtgtgaattagtacagatactatggaaaagagtatgtatgttcctcaagaaactaaaaatagaacgaccatgtgatccagcaatcccactgctggatatatatccaaagacaggaaatcagtgtatcaaagagatagttgcacaccaacatttattacagcaccattcacaatagctaggatataaaatcaacctaagtatacatcaacagatgaatggataaagactgtgtggtatatatacacaatagactattactcagccattaaaaagaatgaaatcctgtcatttgtggcaacatcgatgagcctggatgtcactgtgttaagtgaaataagccaggcatagaaagacaaatatcacgttttcacttacatgtgagagcttaaaaagtggatctcacggagatagagagtagaatggtgcttaaaggagtttgggaatggtatgggggggtgggatggaatgaagagaggttgattaataggtgtaaaatgaaggggtggcctgcccctcgtcacccacagtgacgagaaacactgtgggtgtttctcgtcaggtgggacgagagactgagaaaagaaataagacacagagacaaagcacaggaaagaaaagtgggcccaggggaccggcgctcagcatacggaggacccgcgccggcactggtctctcagttccctcagtatttattgatcattatctctaccatctcggagagggggatgtggcagaacaatagggtaatagtggagagagggtcagcaggaaaacatgtgaacaaaggtctctgtgtcataaataagtttaaggaaatgtgctgtgccctgatgtgcacgtatacaaacatcttggtgcattaaagagcagtattgccactagcctgtctcacctccagccttaaggcggttttctcttttctcagtaaatagaacatacaatcgggttttacaccgagacactccattgcccagggacgagcaggagacagatgccttcctcttatctcaactgcaaagaggacttcctctttcactaatcctcctcagcacagaccctttacgggtgtcgggctgggggacggtcaggtctttcccttcccacgaggccatatctcaggctatcacatggggagaaaccttggacaatacctggctttccagggcagaggtccctgcggccttccgcagtgtattgtgtccctgggtacttgagattagagaatggtgatgactttttttattattattattatactttaagttctagggtacatgtgcacaacgtgcaggtttgttacacgtgtatacatgcaccatgttggtgtgctgcacccactaactcgtcatttacattaggtatatctcccaatgctatccctccccccaccccatgacaggccccggtgtgtgatgttccccctcctgtgtccaagtgttctcattgttcaattcccacctatgactaagaacatgcggtgtttggttttttgtccttgtgatagtttgctgagaatgatggtttccagattcatccatgtccctgcaaaggacatgaactcatccttttttatggctgcatagtattccatggacaagcatactgccttcaagcacttttttaacaaagcacatcctgcatagccctaaatccattaaaccttgactcaacaccgcacatgtctctgcgagcacagggttggggctagggttacagattaacagcatctcaaggcagaagaatttttcttagtacagaccaaaatggagtctcttatgtctacttctttctacatagacacagtaacagtctgatctctctttcttttccccacagtaaaattacacttaaatagaagggataagttgtagtgttcgatattacagtagggtgactatagttaacaatgatttattgtatgtttcaaaatagctagaagagaagactgggaatgttcccaacacaaataaatgacaaatggttgaagtgattgatattccaattaccatcatttgattattacacattgtattcatgtatcaaaatatcacatgtatccccaaaacatgtacaattatcgtgtatcaatttaaaaatacatcatgataggcacctctcaggttgactgtactgtcctgattattgctagtggtgttaacaaatttgaagctagtatctttaagaacgggcagacccatgagcatgcccttctggtttacacactggaagtgaaacaactaattgttggtgttaaaaaatggatttcactgaactatgccatcgccaacagagctatgtggaaatcaataaggaagtcagccctacattaagaatactggctacaaccgcaacacagtagtatttatgccaatttctggttggaatgctgacaacttgctaacatgccttggttaaagggtggagagtcacctgcagagatggcaataccagtgtagcacaccgcttgaagctctggattatatcataccaccagctcatccaactgacaaggcttgtgcctacctctccaggaagtctacaaaattggtagtattggtaatgtctttgtgggcctagtggtgactggtgccctcaaacccagcatgattggtcagctttgctccagttaacattacaactgaaataaagtcttttgaattgcaccatgaagctttaaatgaagctcttcttggggacaatgtgggcttcagtgtcaagaatgtgtctgtcaaagatgtttatcatggcaatatggcttgtgacagcgaaaatgactcgccaacggaagcagctggcttcctgaaccatccagcccaaatcagtgctggctctccacctctgttggattgtcacacagctcacattgcttgcaggtttgctgagctgaaggtggttgatttccttctggttagaagctggaagatgacccccattgtgatttttattgctatggtttctttctaatttagtcttgaggtctctcccttgagaatggtcataagccaagagagccactttctaggagagtcctgaccagggggaaagttaagtttgagtgtgtcagcttggtgagacacaatgaggaagtaaaaacaaaataaatagtggaatagaatactaacaagtacctagaaataagtctagctaaaaatttgcaaaatgtctatggaaaaaaaaactatggaaatttactgagaaactttaaagagtacctaaataactttcaagatataccacgtacatgaattggaaaacatgatatttgaaaatgtcggttattcccaaactgatttatagattcagtgcaacctgaatgaaaatcccaagacgttccttttgtagagctcaacaagctgattctaaaattaatatgaaaatgtaaaggtttatgaatagccaagtccttcttgaagaggaagaataagatgagagtaattgctgtctaatatattgagacttattttaaagctataataattaaaacaatgtagcagttggtatagggataatcaaacaggtaaatgaaatagaatagaaaatccaaaactagtctaacacatatagaaacttgatttatgacaaaggtgtcacagaagtagagtttcaataaaatgctggaaaatgttggtatctatatagataaaacattacattggattcctaactcacaccatacacaaaaatccattcacattgcattacaagtctaaaagtgaaatataaaatcataaacattttagaaagaaaatgtaaaagaatatatcaataaccacagggtagggaaagaaagagaattgacatcaagatacaaaaagccctagccaataaggtttttttttataaattccacacattaaaattacaaacttatgctcatcaaaagataacataaaaacaatgaaaagattagccacggaatggtaaatgtttgcaatacataacacaaaggacacacaaaggaaacttatataatagattttaacaggcttctctgtgtccttcttctccagcaatcaaggaatatataaaaaagcatatcaaggatatatagggtactcttttgattcaacaagaaaaaagcagattatccaagagaaaacttggcagaaaaaagcttggataggtgctccacaaaagaggacatccaaatgactgctactcataagaaaagatgctcaacctcatagaacatccaaaaatgtaaaaacacagtcaataccagatatttgtaataatttggagcaaatggaactctcatacattgctaatgaaaatggaaaatggtccagctgctttggaaaacagtgtggcaatacctaccaaagccaaacacatgcatacctagtaattccgcccaacagaaatgcacatatatgttcaccaaaagatatgcaccagaaggttatagcaggtccatatgaaagtgccaaagattataacaactcaaatgtccgtgattagggtatattcatataatactatacaacaatgggaatgaacaaactatagctacatatgataatatagatgaatctcacaaccagaatgctaagtgaaagaagaaacaaaagaatatatgtagtatgttttatttacacacttcaaaacaggcaaaactaaactatatttttaaaggatgtatacgtaactggtaaaattataaagaaaagcaaagaaatgattatcataaagatcagaatggtggttaccttcagtgggaagggagaaagtatgattgaaaagggacatccagtgagtcttgtgggttgttggcaatgttactgatctgggtgatgattgcatttatgtaccaaaggcatttgtgttttatgcactttattgtatatgttttagttcacaatttttttagttcacaattttaatagggctttaaaaagtaaaaagaaaagagatccaagggcttgaccatgggactctcttatatttggagtatgtttataaactttacattcattcaacattcgacaaatattttttgagcacctactttgtgccaagcaccgttacaggtgctgggaatacaacagggaacaaaacagacaaaaccccagctttcatggaacttacatgctaataaagcttggcaagagtatttcaaggaagatgaagtggttaactatgcaaaatgcttctcaggcacctaggaaaatgaggatgtgaggcatttctacccacttggtacataaaattattgcttttcctctgctttttttctccagggctcagagtggcagtgtccctcagttcaagaaagttgttttccaggaatttactgatggctcctttactcagcccttataccgtggagaactaaatgaacatttgggactcctggggccatatataagagcagaagttgaagataatatcatggtgagttaaggacagtggaattacaagaaaattaattttatatatttattttcttgctgactataatgtattcccacttttggaaatttttaaagtatagaaaaataattccataattatctttgtgtacgttctatttttcctatgtatttttctccttatgtattcaaattataccatgcagaattctgattcttgtttttttactaaatatcacatcataaacatttcttacgtcattaaaaacacttcctatgtatgtttttaaaatactgcataatagtctattatatgaatttatggaaccatagtttatgtaaccatttattttgaacaagcttttagacagtttcttttttcactatataaataacgctgtaatcacaacagtttttctaagataaaattccagaagtgcaatgtatttgagcatcttaagagtttttcttattaattatttggtaatgtcccttgcacatttgtctttcatggaggaagtgcttttcttattgattatgttaccttatatattagatagtaaaccactgaacattttaatgagaggtactttttcaagtttttgttttctcttaattttataaatgatggtttttgaaataaaacaggttttaatttttaggtagtaacccatcaatctttactttttgacactttcattgcttttatgtttataaaaattcctgcctatccagagattttttaaaaaacacctatactttcctcagtttttctcttacagtttaattttttacatttaactttttaatacttcctgtagactaaaagttattttggtgcattgtgtgaaccaaagatcaaagtagttttatttttttctgaaaatatctattcgttgtttcaattaattgatggtgtatattaaggatgtagaaggatctaaaattatggaattgtgggcaatttttgccttacattttattttactttccattatattctatgataaatatgtataatttttaatctggaaagtaagccttttttaaaagataatatgcattcattctagaatttgtcatgaagaaccttaacttacatatcaactcctggcgttatggtctcttataacccctgcagtaacattttcccttttactctggaatggcttttatgtgtttaggaattttctcctttgcaactttgagttcataccttaaatttagaatacaaaacctcctcaggattaggtttgagttctaacagcatccatcttctgtaccacttcttccagggtattaaaaactttgataaagaccaaaagacaggtatttcttttagggatgtaaaccctaaggaccttaagatcctagaagattattcttgcttttttttttttgtcgttattgttctacaggtaactttcagaaatcaggcctctcgtccctattccttctattctagccttatttcttatgaggaagatcagaggcaaggagcagaacctagaaaaaactttgtcaagcctaatgaaaccaaaacttacttttggaaagtgcaacatcatatggcacccactaaagatgagtttgactgcaaagcctgggcttatttctctgatgttgacctggtaagcaggtgtctattgtgctgaccactttttggtttaaaagaaatggtctttgtgtactaagaattttgatatttatcctacgtgcaataagaagctttaaataggagagttgatcattatatttgtgttttagaaatgtcattctggaatctactgaagaggatggattatatttttggaaggtgggaggcaggttggactggcataaaaattgatgagaaatccactctggttcataggtgagagagcttatactcataggattgatgtcttccctccctaggaaaaagatgtgcactcaggcctgattggaccccttctggtctgccacactaacacactgaaccctgctcatgggagacaagtgacagtacaggaatttgctctgtttttcaccatctttgatgagaccaaaagctggtacttcactgaaaatatggaaagaaactgcagggctccctgcaatatccagatggaagatcccacttttaaagagaattatcgcttccatggtaatatattccacatccaaacattatcactgtgaaatgcagattgcactttgacaaatgagacttgatccagggacttgaacattgtatttatttagagtatatctgtgggagtggaatcctcatagatgtcagtttttttggtggagtggagagaaagaaacttatataatagattttaacaggcttctctgtgtccttctccagcaatcaatggctacataatggatacactacctggcttagtaatggctcaggatcaaaggattcgatggtatctgctcagcatgggcagcaatgaaaacatccattctattcatttcagtggacatgtgttcactgtacgaaaaaaagaggagtataaaatggcactgtacaatctctatccaggtatgagcttgtttgtgctctttcttctacctactctatttgttgagtacttactttaaatggtctaggcactgggaacacaatcagtgatcaaagcagacaagctccatgctcttaagtaatactttttcaaatgctttttaaaccatttgttcaaagcaaatgaacaagataatttcagatatagaaaaattgctaaaaaggaaatagaacagaataaatggataattaatgtcacagtactttcctagggaaaaggaatttattcctttatcatttaccatctcaaatcccatagggcaccagtagtcatccaaagagtcatttgtttatgtatgtaaccagtatattgattaagcactactcataatgttgatcacaacacaattttattttggttcttcactgtccctttaaaatagatttggccaggtgcgatggctcacacttgtaatcccagcactttgggaggccaaggttggaggattgcttgaggccaggagttcaagaccagcctgggtgacaaagcaagacccccatctctacaaaaaataattagccagacatgtggtatatacctgtagtcccagctacttcacctacttgggtggctgaagtggaaggattgcttgagcccaggaggttgatgctgcagtgagctatgaaagtgccactgcactcaaacttggacaacagagcaagaccctgtctctaaaaaaaaaaaaccatccagtttaatagcgggggtaaactttccttatttcttcgtaaaaattctgataagccctgtaacttttctgctcacccttaagtaataaacaggactaaagtcactttatgtcacaaatacagttcaaatcagaaattacaatgtccatcccaagatattaatcaaaattgtaaacttgatttaacttcaatctcccctcctccaacttgagcctgcatcaggctggaagtctgcattggaaaagggagacatggttgagtcctctgtttctgtaccttgtgatgatcgtgcttccccacaacccctttatagctgctgttttgaactccaacatggataggttaaaggtaaggggataagatagttcttacctatttacagctggcaccattgttgtaaactagcttaacactgtttgtgcctggcaatacttgttgactctttctcctgcagggcactttcagggaactctttagagactcccttacgtgactgtcatgaaatccccttgacatgatttcttccacctttactctgggtggtcacttgtgactcatttctcagccctcagtgttcacctgcagcttcttgttgctggggtaactttacccttgtaggcagctctagtggactggatccagagggaactcaccctgacttatctgtttcacagagtccacatctggccaatgggaaacacaccttttgctcagaaagaccctgggaatgtaggtcaatcataatgcagtagcattctcctgtcccaaccatcaaagaattcagtcaccctgtttctcatctcctggggggaggggagtggtcagaactcaatctccacaacccccaactgtaagggtcacgtagcaagcactttgcatttgaggggtccaaaagtagtggaactaccaaatttggtaggtctactctgatatttcgcataaaccaatgtatctcatgctcattttttagtgaaaagaaataatttctgttcctgttggtttttataaggtgtttttgagacagtggaaatgttaccatccaaagctggaatttggcgggtggaatgccttattggcgagcatctacatgctgggatgagcacactttttctggtgtacagcaatagtgagtagcaatgtgggcagaggttccctacctactcagcctacttctttacagctttcttcctttctggaatggttgcttgtgtcaggaaataaatacaagtttacatcattatcaaatttaaaatgaatattgctggtagaaatcatcagagttctcagagtagggcagatatacttgaagctttgaacactttgtacctgaagctctaaataattgacaaaaaaaaaataccacctcattttcacaacttggtaaagctcgaagatctccagtagcagattttggaatttaatgttgatttagttaccagataacttagaaatactacttggaagagtttggagatttaaccctaaacaagtaagagagccactggtctatttatgtacggaccccagtttcttcagctgtaaaatgtgaatcattctagcacctgttaggattaattaaatgaactaatacagtaaaacgttgagtacagttcttggcacatttaaacactaaaaaatagcatttgttgacgttctcccattttcattgacttacatttgagaagctgaattttgtgcacttctagttactgtgttccacccgtttcatttcagagtgtcagactcccctgggaatggcttctggacacattagagattttcagattacagcttcaggacaatatggtaaatactattatttttgctccaagaacctgggctgattatatctttttttaataatctggtggagaatctcagataatgaatccatctccatgcttctattagttctattccataagtgcctctcaaatacatctcctcctctccacttcccactgtggccatcttaactcaggtcaccatcatttcttacctgggcaatgacactgcctccttaaatatcctccctaccttcagtatttcttccttgagtcaattcttttcagtgcagcaggaagctatactttcctatgagcagtaatggtaaagtttgactagggtctatagagaattctcagaaattgttttagagcactactgcccacaggctaaatgcagcacactgcctgtttttgtatggcatgtgagctatgaacagattttccatttttaaataattgtcaaaaagatgaagactatttcatgacatgtgaaattataaaattcaaatttcagcatccgtaataaagccttattttggaacacagccacgtccattaatttacatatcatctatggctacagcagcagtaacatagttgcaacagagaccatataatatgcaaagcctaaatgatttactatctggccctttacagaaaaagtttgccaacctatgttgttgtgaggtaaaaaaaaatcctcttgaaaaggaggcgtgagagttttacaccaaaatagtaacatttttcactaggtggaagggttacattttaaaatgtcttttatttgtatttttactaatttttacttttcattttctgatttttctacaatgaacatacattgcgtaataaataataggcggggcacgttggctcatgcctcccagcactttgcaaggctgaggcaagcagatcacctgaggtcaggagttcaagaccagcctggccaacatggtgaaactccgtctctactaaaaatacaaaaattagtcgggcatggtggtacgcgattgtagtcccagctacctaggagactgaggcaggagaattgcttgaactcaggaggtggaggttgcagtgagccaagatcatgccattgcactccagcctgggtgacaaagcaagactccatctcaaaaaaagaaagaaaagaagaaataatattattatttggtagtgttggtaacaaattgcagtatcagctagttagaggtgctaacaattaacaaaattataaattttagaaaataaaatggacaacaaggataagcaatatccttagatagtaattgatactggtatgccataaagcctttatgtttttctctattttcaccacagcttagattaacctttctcaagacaataattttattctcaagtgtctaggactaacccagctgaatttaatctctgtttctttacttgggcaaaggacagtgggccccaaagctggccagacttcattattccggatcaatcaatgcctggagcaccaaggagcccttttcttggatcaaggttagaaaatgtaatcaatgatgggaaatgtatcacattcaatcaattgcattacttattcctcttgcaagctcaaaggattctatgaatatgagaaaactaaagaacagaatgccttaatgatttgtacaaaagcagtcatgaacaaagagatatggggatagaattgagtatattgatatgtcctgtttctgtattttagtccttctactgggattagaacatctgaatattttctataatattgaactcgtcatctctcaagacagtatatgttattattagatgcttccaactgcccacgtgtccttaagtactccaatcccctttattttaacataaaacaaatggttcacaaatgcaaaccacatgtgtacttttacattttctgtagccacgttttcaaaaatgtgaaattcactttaataatacattttatttaactcaacatatctgaaaatactatcatttcaacatatgatcaatgaggccccttcaaagacagacagatggaaactcttgggtctcttccatgcctcacaaaagctgagggcagcttggaagtgcctgctcagcctctccacctaaacataaggctagatgccttctagaagcccaaacaggaaatggagaaaacattttggtttccatctttgcaaatagcatgtctattaatgccacagcattgttttgtagacactgccaattttgactcaatctgagctgctgttcactaatccctaagtattttttgttggtttgtgcttctgccaaacaacatgttatgttcttcaccttgtatttctatggttattttcaaccttaagtgtatccctatatagagaacatgtttatctatttggccaccctgtgtctgtctgtgctatttaattttttgtaataacattcttatttgggagggcggaattatatcttcctcactagatacaacctgataagactagtaaatagagtgtcctgtctgtgcctagccaatgaaccctgaatgatatactctgttgtttccacttactagatttggcccattgtttcagcttgccgatcttcagtgtcccaaagtatttcctagtttttccagttactgatttgatcagtaaactttctaatactgcagcaaagtcatgatcaaaatattgaagtagacaagacttccttagtatgtgcacaatacaaatcaagctgttaagtccttactacaaccttgtgaggtagatgttactatcatcttcatttcagataatgaaattgaagcatagagaggttattgtggcccaagtcacatggctaataagtgactgagccaaaattcaaattctgatagttgggctccagaaccctaactggtaatcgttgtactacactgtttccggaatgctccctttaagttgataaccatctattaactgtcactgttcacttgtggtaattaaaccagttacaaatccacctagttatgttatcatctaccactattgaatcgccttatcttcaaggtggttttgccatctgtcctactaaggtccagctagactttttatagatctcgtaactttataaaataaaccatggagatggagttgaaagggggtgctgacaaggaagggagttggagaaggcatctattctcgtgagaaggcctgaagagtgcacaacagcctggccccaagacacaagagcactgggctggcttgaggagcaccaggtgaccaagaccaggcaatgcacagggggaagtcagcaggccccatggagatacgcagctgcagtgtttgtacttttatacagtgaaactcattaccaccttgcttacttcctagtagagagatgtgtcttgtagttacactgaaacacctggctgggcacataggtgaagctgttgagtctgtaattgtcaaactgctcccaggtgccaattataatgtagaagaggcacaagaagatgaagtggataagcctggcagtttgtcaagcattcatcagttgtcaagcatttgtcagttgcagaatgtaggtaggctgccaaggctttattgtagcctggttctattgcagctttattctagcaaggctgctggaaaatacaataatcactggtccaagaaagaactcttatactctatctatatgaagaaacagtaaaagtcaattcagtagaaatcatgatttttgtgcctggtgctttcacttttttatgccacaataccaagaggttaaaatgaagtgtctttgattgggaataccatctatctgggaaaagacagggctgcaacttctgaagaccttgacactctgtcctgttaccctgcttcatttttctcctgcgcttatcactacttgatgctataaacaaataaaaacatatatgatataaggtctatttctcctactcaactgtaagttccatgagggcagggctttctttcttgtttactactctattccctgtatctaaaacagtgcttggcacatagcaagtgctaaaaaatattctttgaatgagtgtatgaatggaacttacagtcagctgaaggagacagttattaagcataagagtgatgaccagtccaattgtgtgtgtcaggcatgtgtgaaaacgtgctaaatttgacttgcttattaggacagtaactgatacttctaatgttcttgcagcccatgacctcttctttaagaagtgtccattctgtactactttcccattattcactcattcattccaaagcatttgctatacagcagtattataccagataccatattaggtgctggggctagagagaatataaaagctaacattgattgagtgtttagtatgcgccaggccctgaactcagcacattacatgtattaactctttaacccctatggcagccctttgagataaaaactaatattatcttcactttacagataagttgagacacagaaagttaggtgactcaaatgggttcactgccttaaggatctcagtctaataaggaaagcagaaaagcaaagcaaccttataatatggtgcaataatttgctataatgaagttatatacaaagtgaagtagaagcatagaagaagcagcactaaatttgtctgggtgagtcagagaaggctaaccaggaaaaatagtttctgaactaacacttgaaggaggtgtagcagttcatcactgacagtgatgttggggtgggtctggtttcaggagaggggaggaaattggctttggtctgaggctgaggtgtgggcaaagcattagcttatgtgggtccattagcttatgtgagtccacaaaaggtgtgtgtgtgtttgtgtgtatgtgtgtgtgtgtgtgtgtgtgtgtgtgtgtacgaaatgggggctcaatgatttggtagtggtttggtttgtcaagaagcaggctgggaactcaataagcatctttccattcatttctactgtgtatcccacagcttcacacacacatgcacatttcaacattggtgactgcttcacttgcacacctaaggtaatgatggacacacctgtagcaatgtagattcttcctaagctaataattagtttcaggaggtagcacatacatttaaaaataggttaaaataaagtgttattttaattggtaggtggatctgttggcaccaatgattattcacggcatcaagacccagggtgcccgtcagaagttctccagcctctacatctctcagtttatcatcatgtatagtcttgatgggaagaagtggcagacttatcgaggaaattccactggaaccttaatggtatgtaattagtcatttaaagggaatgcctgaatactttaaagaattttggcagatttcagatattggacaaacactcttagcttccacaaacttaattccaaaaaataatttttcacttatgagcaatagagttattacggacatatcagcaaaaatgtagtagtgtcaaggctcatagatgatagaaatgaagagatgctgtattgatagaaatatgtgattcaggactgtgtggattgatgattgtgagcttgcttatggatatcctaggtttgaggttatagtaggacaatcaggttgaaatgtccagcaggcagtaggtgaaagacaagtttagggggcaaaaccatggatggagatgaagattcatgacttccacataaaaggatgggtgaaactttgggaattgatgaattctctagaggtgagctcaagacccttaaaggcttaaaacctcagcgttattgtctactcttccctcatttttatgcccacaaatctggtcaatcctttatttgcaatgcctctcacatctctttcttctgtttccatttataccgctgttgccacagcccagggtcccatcacctcacacttgatctattgtattacattcctaactagtcttcccccgtttctaatctgttctccgataaaagctgcacatcattttcaggataatcatcagtcgcctgcctaaaacttttcaatgtcttcccattgtctttagaataaagttcaaagtcttcaaatgaccccaagcaagataacttttgtttgcccctttagatccattttcctgcttctctaccctgcttcttgttctgtgaggtgagcttgtatagaatacatcaacaggttaccttgtcctccagcttttggttggatttcaccaacagggagcactggcaaaagattggcatatttattcttctgactttctccttgcagaggagttcactgtatctccccacttaaggtcactgtttccctcagagtggctttttctacctgtactagctactattgctgtgtaccaagccacttcaaaacttgctgtcataacaataaccattatgttttgctcacagattctgtagatcaagactgggacacagtggggatgggtggtttctggagcctcagttaggattatttaacagctgggtgctggaatcatctggaagttccttctcttgcttttctggtggttggtactgactgtcagctaggacagaatctggggttgttgactgatgtaactttacatggattatccctgaggcctggccttccttacagcatgtttcaaggtagttggacttctttttgagggggggtaggaaggtggggggaggacagagtctcactctgttgcccaggctggagtgcactggtgtgatctcggctcactgcaacctctgcctcccgggctcaagtgattctcctgcctcagcctgctgagtagctgggactacgggctcatgccaccacacccagctaatttttgtatttttagtagagacagggttttgccatgttgaccaggctggtcttgaactcctgacctcaggtgatccgcccacctcagcctcccaaagtgctgggattacaggcacccggcctgtagttggacttcttacacgtcattttagggcctccaagtgtgagtgttacagttaacaaggtgaagactacataaccttttctgaccgagtcttctaagttatgtagcatcacttttgttgacaaaaagtgttgaactctataaaatatttgaagagatttattctgagccaaatatgagtgagtatggcccatgacacagccctcaggaggtcctgagaacatgtgcccaagatggtcagggcacagcttggttttatacattttagagaggcttgagacatcaatcaaatacatttaagaaatacactgatttggtccagaaaggcgggacaactcaacctgggggcttccgggctataggtgaatttaaacattttctggttgacaattggttgagtttgtctgaagacctgggattgatagaaagggaatgttcaggttaagataaacattgtggagaccaaagttcttttgaagtcttatagtggctccccttagagacaatagatgacaaatgttttgtattcagatcttagttaatctctttaggattgggaggggctgggagaaaaagatctagctatgttaatagagattctttacagttgcaaatttccctccacaaagaacagctttgcagggccatttcaaaatatggcaaaaaaacatgttttggggtaaaatattttgattttcttccttgtctcataatgttatgccagagtaaggttggaaagtaaatcatgacatataaggttaaataaaacccatctgatgagaatttatgatttgtagggcatgactccccagaccccttagataggaatttgggcaagataaaaaaaaatcagagtttagtcctcactttcaatacattctattggttataagcaaatcgcatatccacccagattcaaggggaagagacatagaccctaatttttaatgggagaaatgttaaataattggtggtcattttttaaagccactacaataatctatccaattctctctttcaggatgtttctctcttctgatcctttcaggtttagggattgtcaacaaacaaaaagttaaaccctgtaaaatacttgaagagatttattatgagccaaatatgagagaccaatggcctgtgacacagccctcaggagatcctgagaacatgtgctcaaggtggtctggctacaacttggttttacgcattttagggagacataagaccgaaatcaatagatggaagatgtacattcattgagtttggaaaggcaggacaactggaagcgaggcggggcttccaggtcgtaggtagattcaaagattttctgattggcaattggttgaaagagttaagttattgtgtaaagacttagaatcaatagagaggaacatcggggttaagataaggggttgtgaagaccaaggttctgtcatgcagatgaagcctccaggtagcaggcttcagagagaatagattgtaaatgtttcttatcagacttaaagagtctgttctatcagtctgaaggtctgtgttgatgttaatgctggtcagatttttctgaattccaaaagggaggcgggtataataaggcatatttgatccccactttcccatcatggcctgaacgtttttcaggttaactttggaaggccctttgccgaaaggaggggggattagaattttattttgggtttacaggatggtaatactctgttcccaccctcctaactagtatctttattaaaccttccacaaattatcctaatttccatgttttctgttccttgctggatcccttgtttcatacagtaattggtgctagaagaaaccccaggaaacagattttcaaaatgcaattctaaggttatgttgctaatatattcaagaaacacagagataacatatttgccaaggaagaaaatgagcagttagggaatccatgacatgtgttagtattatagtttctcagattatcaccagtgatactatgggatgagttgcagatggcaagtaagacactggggagattaaatgacagtggcatttagtcactgtggcaacaaacgtagcattacctgattgtagagtggtctgtcttcttacagccctagagggcatacacatggaaaaagaaatgaaatgttatgaatatatacaaaataagaacactgatgaacatacatggaaaatcaggatgcatgcatagagcttttgaggaatactccgtatcctgtggttgtaggcagatacgacttaggggctgagcataagttgcagagctgcagtgacaattaaatgcttaactccaccagatctattatgctgtggtaagagtaccggtgggaaggagtgaaactctgaggcctgagatggaggcatttaggcagacatggatgaggctgagaattgcaaacctccaaattcccctgaacctcctttgcctgaggaggcaaccactccccagtctctgaagcagtcatccctcttttgtgtaaaagcctttcagtggctataactgagataggtgcctcacaaaccagtgactattctccttagagaccctgtttggacactacgaaagccaggcgagtcacagaaaatgacagcagatcacaaatttaatcaggtggtgatgccaaaaaacaattgcaattccagatatcatatctctgttgaagcaaatttacacagccccaggcacctgatatggaagtattgacctagagaatgttttttcttcatttccatacattagtaaaatcagaatacatttgaatttaccaagtaggaacaagagtattaagtttactgcccatgcatcagggcaatgttagctctcttgttttctatcataatatagactcaagggacctcaaacatctttacatcccacaagcacaatgcctgtccattacactgatgacattatgctgacaggatctggtaaacacataacaaataagcctgtcttgctcttgactttaatgagaatgtaacctgtgtttcactgtttaatataatgttcactgttagtttcaaatactttttatgatgtttaaaaagttttctcctatccctattttatttgcaatggcaactgaattttatcaaatgcttttccagcatctttgacatggtcacatttctcttttgtgttgtcaaattatacttaacattcaatagtgtgctgacaagaaattaacaacccacaggggagcaaagtgagaagaggttaagaagtaaaggccttgatttatagcattggcagatttccctgacataaatactactcccatcatgcctggccccagggatgggaagagatgcttacttacaattggctctcacagaccagtgcaagagcactactgtgctccatttctgggaaaactttcgtcagtcatagtgtgttagttatttaaaacttagctggatccaatttgccaacatttcatttataatttctatatctatattcatgaatgaaatgggtttagctttttcagtagctctacttaccaggttttggcatgagggttatattaaacttgaaaataaagtgggaaagcttccatttttttccatgaagactattgctctagaatagcttatttaatgtaggaatccagtatttaatgagagtaaatgaaaaagccatatgagccatgtgctttatttagtgagagatactaggctatattttccaatcgttatatgattattgctattctcatttgtgttgccttgagttaatgtctgcaaatgtgcacattagagtcatatatcccttcctgtgccatacatctatatctgtatacacacatatgtcttttctccttttttcccttctgtatcaagagttggcaagtgtttgtctattctattaatttttcaaagaatcagctcagttttaaacccaaacgtggttttgaaagagctgtttctagttcatcaatctctgttcaaaactttaaaaattctattttcctttcttttggtttgtttcctacaatctggaggtgaatgcttagttcacttattcttcaatctttgtattttaacgataaggataaattacttacagttattaactactctcatgaggttcattccttgaacagtcactgagcaactactatgtcctgggttctaattcaggggtgggcaaactatagccccagaatttggcccatagcctgcttttgtacggactgtgagttaagaatagtttttacacgttgaaaggattgcaaagacaaacatacaaagaaacaaagaagactgtgcaacagagaccacctgtggtctgtaaagactaacacatttctatcccgcccttgacagaaagagtctgtgggctgctggtctcctctaacggtggtagagatgcctgcacggttaacattaatccttggcaccagaatcctcagcacctaggaaccagatcttgcctaacacgctaatttcagtcttgaccaccttcctccggcgtagcggttctcaaacgtctttgtctttgtactattcacgtataaaatattctttcataagcaacatttatccttttgggaatacctcacaatggggagaaggggaaccccaacagcctttaagggttcactgcttcgctgccaccatttccgacggtttacactgttttaagtgtgaatttggaattgttttcaagttaaaaagcaaactaatcatgtcctctgaaagtatttgcttttggcatgctagaaatcagtgttgacttttgatactgatgtgatacattacgagggaattctcaaaactgctgaaatctggcctcggcccagttatcactgctcttaagcttctgagggagatacatgaatgagcccacggcaaatggaaaacgaggagttttagtgtttcctagaattatgctcagatacccactacctgaccgtctggttatccttcccctcacctccctgacgcaaggagtttggaccagaggcctaaggaggcttctcctgaagcccaaatcccaaactggtcaccagtcatgctccgtaactcctgaacctgacaagaagccagccggccaggtctgcagcccgggttaagaggagcataccaggaaagagccaaagagcaaaggagcatgagcccttcaaccgcttttacaataatttgggctaggcgttcagggctccgtaggacccttcctggcagccaagtgagagaaagaggaatgatggtggaatgggcctctcctgtgcttcccattacttccacactgtcgaaatagaaatagaagcagaaaagaacaccctacaagtcccacccatttggaggcactcaactcacagtgacaaccctccacacctctcccctgcaaaaagacgcaaaacaaaaacacctactccaaactgtgtccttacatctcagccccgaagatcaggattgtgtgcaacttcggcccaaaggatgcatttccccagggttgaaagtttgagaaagaggctatattctgaagagttcttgttgtcaccatcaaaaggattaaaaagacgcaataaataagaaaacagcgtagttggggggcatgctccatttgagccagaaagccttggaaacttaagtgttctcaaacggaacgccatcctgctttgggggaacacggaggctgccttgcagtcacgtgatcgcacaacaccaaagggccacgcactctgatttcacctacttaactaaaagttgcagcaaaatccctattacaggccaggcgtggtggctcatgcctgtaatcccagcactttgggaggccgaggagggtggatcatttgaggtcaggagttggagaccagcttggccaacatggtgagaccccatctctattaaaaatacaaaaattagcccagcgtggtggtgcacgcctgtaatcccaggcaccctggaggttgaggtaggagaatcgcttgaacccaggaggcggaggttgcagtgagccgagatcacgccactgcgctcctgcctgggcgacagagtgagactccatctcggggggaaaaaaaaaaaaaaaaaaaaaaaaaatccctattacaaataaaagctgttgtgatccagactgcatatacctctgcgaatggaaccagaaccgtgaattccaatgcaaatcgatgcatcggcaccagacccgctgcactggatgtatctgcattgcagtcacccgagtacggagcacatcatagatgatctctgcaggttcgttgcccacataggaggcatagcgcaaatttcaaaggaacgaatacatcctggagcccaaacagctatctggttctgctgctggcctcctgacaagtaggtaagagagtcacattttatagacgacggacaccaaaaccacacatgaggagtacaagagtagctttatcatggatttagggctgtggttacaaggaagctgtaaggaataaaatgactcccatgaagacgtaccgtgcggacgagtggaaggagaaatttggccattacaaagacacaggaatatgttaagaagtgaggggcaggatgaaatcatctagggtaggtatttagagggagggcgccgtgcaaaataaaatcctcactatgaaacaaaggcggaggcaggaggctgcgttaggtggaagcagcggaggaaggagacgaaagggattgtcattttcatgtcgtggctttttagaagacagccatgtcctctactctgattctatcaaaatgtgttctcggggtgctggtaacgttcagccaacgaaataattcctatggcggcagtaggaataacaaaacgcagaagcgggaacgatgtctttttattcctccccagacgcaaacgtggatgcatgaggtttggtaacaggcaaagtcatctggttaacgtgactgatgcaaaaagtccaggcctgggcaaaaagaagtcactgggtgaatgggatggatcagactccctgtcctgagggggagatggtttcttgcagaacgaggtgaaggaggtggttctgctcagcagtcaacagtggccacatctccacctgcagcgacttgatggcttccgtgtccttttcgtgggtagccatgaccaaagactggagcagcagaaagagctcctcgggaagctggccgctgctctcctgcccgtggctgtcaaaagcctcccaggagtacttctccagggtctgggcgtgctccggcagcagcttggcgggcggtggttgcaggaggagcagcagcagcacgcgggacacctcgcagcggaccagcacgtccgagaaggcgcccagggcggcgggagagggcgccgccgagccggagttcggaggaagcagcgcggccggtagggcgggcgtcgccccgggcccgggctggggtgccggcggcgggggcggcggcagtgactgcaccgggtggctgccgtgctcccgcgccaggcgctgcatgcgcgtgaagaccgccagggcgccggtgtagtcgcgcgccagcagctggcaggaggcggcctcgccaagcgcctgcagcgcggccaggggcagctggggcagctggagctgggcggcgcgctggaagtgaccggcggcggcggccggctggcccaggtcgcgcagggcggcggccagctcgaggcagagggcggcggcggcggccggctggcccagctcgaggtgcagacgcaccgcggcgcccagggcgctggcggcggcctgcagcggctccccgtaggcggcggggcagaccaggcgctggcgcgcgtcgcgctcctgccgcaggaagaggcgggcggcctcggtgagggccagcgcctccccgggcccgtggaagagcgcctgctggcagcgcgccaccgccagctggcaccaggccgcgtagggcagacactcctgggcgcgcagctcccggcccagctgtccgaactgctcgccggcctccgccacgttcggcttccgcaggaaccgcttcttcagcttgttcgataccagccggtagcgggccaggaagtccccggcctcgggtcccgggccggcgccgccgccgcccaggcctgcagccgctgccgccatgctcgccgccccaagcacttcccgacgcgccgccgcagctggcgggcgggccggggcggggcgacgtgccctgcgtccccctcggcgggctgccgccgtgcccgcgccggctccccagcccgagcctgccccttgccctgatgaggtgcaaagagcgggatcggaggcggggcctggccgggctgtgagcggcgtatgcaaatcgagggtctcggggatgcggatccaagaccctgggaaggtacgcggggcctggcggggcaccagctgctgctagctcggctgcaatgcaagtggtctaggttgctaaaggcatcccacagcctctccatctgaacatgacccaaacgaaactcgtgaccctaattccatgtctgcgcatttctagactgttgtccccccccccccccgccccgactactcagtcctccgtcttccggtccagggccccttgccaagcaccgggtccacctctccgtccccaccccggttgccttagaagtccgtcctgtcgcaacactgcagtcatggtcttgaggcccacccgccccaacgaacaccatcatgctgaggactttcccgggcaggccctgacttgctcagaaccagcgggggtgtccccttcccacccagggccactcccctgcactgtcacccggagagactgctcctctgtgccatccctggctcccacccaaccccagacccccaccacctctccatccctccagctgtggaggtctcacaaccccccaacccatctcaccgcccccccacccccaccccaaggcaaagtgactgaagcgggcagatggcttccttgaaacattttattgacagaattaatgaaggcccaagactttggggcctgggttgtggggggagggtgtttaaggccgggggttcaggccgggggatttggggccgggtgggtggacgagtggacctgtcaggtcccaggggccgggtgtcagaagctagtcctcgccaggggccacttgagagatggtggtcgtgttgaaaagggtgctcagtagcctgtcgttgtgaaccaccatgtccagcagcaggggagtgatgttccgctctccgctgttctgggcctcgttgcccgccagctccgggaccttggccgtcaggtactcaataaccgcagcgaggtagaccggcgccgtgcgactcaggcgctgagcgtagtggccctcccgtagactgcgctccacctggctcactgaaaacgaaagctccgctcggacggtgcgagagcaggtccgcccccggccgccagcaccggaggaccctcggcgtctcctcctcctcggcatgctgggcgttgagtgtgctatctcggcttggcccagctaggcaagatggctctcaagaggacagttaccgcgtccagtactgtgtatcctagcgaccagggcccagcccctcattggctagggagccgagaccaatgggcacgcacatccggcgacgggcacgcatgtggtgacggcccctcacaagggacacacgtccgtcaggtgacctcatcactttcccattggcctcgagggagcaggcctgggcctagaagtggctggagggccgtgggggtggggtggggcggggcagggggaatcgcgctggtgaccctctctttgccagtgggaactttccctttctactggatgggaacaccgtgggaaagacaaaggggtgggcgaggggaggacgggtaccacgccttcacaatgttgcacatccatcacgaccacctagttccaaaacgttttcaacaccccgaaaagaaaccgaaacccctgtacctataagcagtcacttgccgcacgcctccttccacaccaccactaccagcccccacaccctcccacacacaccccctgcccccgcccatacacacgttcccgatagtccctggcaacccctagtccatctgctttctgtccatagaggttagcctgttctggagatttcctatagatggaattatacgaccaaatgtgaggccgtgtgtgtctggctgctttcacttagcgtaatggtttcatcagggtgcatccatgtagaggcatgaatcactacttccttcctttgaatgactgagtacgattctgttgtatgaataggaggccacattttgtttacccactcgtcagttgatggacaggttatttcccccttctggctattgtgagtggcactgccatgaccatctctctacaggtttttctttgaatatctcttttcagttcttttgggtctatttctagcagtcaaactgctggctcgtgtggtaattctgtttaacttattgaggaaccaccaaactgatttccacagcagctgtaatctttcgcattcccaacagtagtgcatgagagtcccaatttcttcacagcctcatcaaaacctgttttctgtttgcctcattttgttttgtttacagtagccatcctactgggtgtcaagtgctatctcatggtggttttcattcgtatttcccaaatggctaatgatgttgctgtggtttgagtgcatcccccaaattgtgtgtcttggaaacttaatccccaaattcacatgttgattggaggcgcagcctctgagacggtaattaggattagataaggtcatcggggtgagacccccaggatgcgactggtggctttataagaataggaagagaggcctgaaacgacatacacgctcttgccctctcgccgtgtgataccctctgccgtccccagatgccgggtcacttcccagtccccagaacggtaagaaataaatttcttttctttataaattgttcagtgtcgggtattcaattatggcaacagaaaacagactaagacatcttttcatgtgcttcttggccctctgtacctctgctttggaggaatgtctattcaagccctttgcccattttttaattcggttgattgtattttggctgtgggcttctaaaacttattcatatattctggaaaatagactcttatcagatatgtgacttgcaaatgtttctcccattcactttctggatagagccctttgttgcccaaaagatttacatttggatgtagtccaacttgccaaatgaaaagatatctgtggctttgcctttggtgtcatactgaaggagctgttgcctaatccaaggtcgtgcaaagttacatctccgttttcttcttagagttttatagtttcagcccttacatttagatctgtgatccattttgaattaattctttacatgatgtgaggtaggggtccaggggccttcttttgcatgtggctatccagttgtcccagcgcagtttgttgaggggattattcttcccctccacccattgaggggtgccggaactcttactgaaaataaactttacataaatatatgggtttattcctgactctgagttctgtaacattgacctaatgtatcgatcacgatggcagtaccacccttttcggattactgcggttttgtagtacgttttgaaattgggaagtgtgagtccttcaacttttttcttttctgagattgttttggctatctgagccccttacattttcttatgaattttaggatcagcttgtcagtttttacaaagaaggcaggttggattctgacaggcatcacgatgaatctgtatattgccttggagattatgggcatcttaacaatattaagtgtcccaatccgttaacacaaaatgcctttcgatttatttaggtcttctttaatttattttagcaacgtcttgaaattttcagagtatacatcttgtacacctttagttaaatttattcctcgacattttattgtttcgatgctactgtaaaatgaatcatttccttaatcttattttcatgttattcattgctagggtgtagaaatacaaccgactgttgcagattgatcttggatactgcaactttgctgagccgaatatgctttgctgagcatactcagacagggttggcatattagtccgttcctacactgctataaagaactgcctgagaatgggtaattcctaaagaaaagaggtttaattgcctcatggttctgcaggctgtacaaggcttctgcttctgggcaggcctcaggaaacgtgcaatcatggcggaaggcgaaggggaagcaagcaccttcttcacatgttggagcaggaggaagagagagagaacgcacgcaaagggggaagcgctgcacattttcaaacaatcatcagatcttgtgagcgctctatcagaagaatagcaagggggaagtccgcccccatgattcaatcacctcccactaggcccttccttcaacaggtggggattacaattcgacatgagatttgggtggggacacagagccaaaccgtctcagttttttttttttttcttttgttggactctttagtgtcctctatataagaacatgccatctatgcatctatgaatagagatggttttacttgttcctttccgatctggatgccttttatttctttttcttgactaattgccctgactagaactttgagtacgatgttgagttacaagtggcattcctgatcttagggggaaatcaaccagtctttcaccattaagtatgatattatctctgggtttttcatggatgccctctatcaggttgaagaagtttctttctgttcctggtttgttgaatttattttcatgaaagggtactgcgttttgtcaaatgatcctttttgtacatgattaagatgaccatgagccccctcccccgcccccgctccgccatgcattctgttaatatggtgtattatataaattgattttcacatgttgaaccaaccttacatttgtgggataaatcctatttggtcatagtgtataaagagtggtcaataaacatttcgttgaaagaataggagtggatctggcaagcttcttggaggacaatgtgtgtgttaaagaatctgtagcatgatgagaagccaaggcaccggtgggaggaggggagttgcaaccaattcattaaggctggagagtacgatgccagtggagcagtagtggttgatgtggctgggaaagaggtaggcaggagccaagacatggaggttctattatgccatgctcaggttttagaataccctgtaggctacactgaacccactgtggtctttcagcttgggagtgacgtggtctgatttgcctctagaaatatcaccctggaagctgtgtggagaatagaacagagaggattgtgtgtggagaatagaacagagaggactgagattggaattagaaagctgctgtattataccagtcaagaaatgacagatatctcaactaagacaatggcattggtagataagactaggggacagagtccataaaaagtttaggtagtaaaatggcacacagtagacactcactacatattactcatactggtgaacctagctggagacatgataattcatgtgctcattcttcaaaaaatattgaagggtagtgccaggtatactgtgttaagcattgagacaacaccaacgagaaatattctgttgtataaataggccacattttgtttatctactcatcagttgatgaacagttcattaaatgatttccatggcaggggaggtaaatgttgtcctctatcctcttagattctccagctaggacttaaataagatagattaacaaaagaaaagcatacaaaattttatttggcattttttacatgtacatgggagccctcataagaaatacgaagactcaagtgattaattacagctgaatacttacatactagggtgggaaaagtatggtaaattgtgaaaacataacaagacattggggtttgggctaggagagttaattgtggaaaagtcactaagaaggtaagagttgtgtaacaaggttttttggtgcagctttccctcaagcctggactccccatctctggcaataagaatgtgtttcttcttcctggtatacagataatacctttcacatcagagtttcatctcttcctttcatgaaaaaaaaaggaaggtcagtgtgcccttcttgcatctgctactttcaagtgcctttaaacacaaaataatcaatatgccaaagtggcatattttgaggtggcatttgatcccctacattactgattggatagtgtgaatagtgctgccatgaacgctcctgtacaagtgtttgtttgaacagatgttttaaattgcagacgctcctcaacttgggatggtattatatcctgataaacccattgttagttaaaaccattattagtgtaaattcatttaatacagctatattagtccattctcacactgctataaagaactacctgagacttggtaatttatgaagaaaagaggtttaatggactcacagttctgcaggcttaacaggaagcatgactgtgaggcctcaggaaacttacagtcccagcagcaggtaaaggggaagcaagcacgccttaccatggtggagcaggagagacagagagtgaaggacggaaatgtcatacacttttaaaccatcagatctcatgagaactcactcactgtctcaagaacagcaaggggaaatccacccccatgatccaatcacctcccaccaggcctctcctctgacacacggggattacaattcgatgtgagatttgggtggggatacagagccaaaccatatcagcggctaacctaccaatcatcataatttagccaggcctaccttaaacatgctcagaacacttacaattaggctacagttgggcaaaatcatataacgtaaagccaaatttataatgaagtgttgactatctcacgtaatttattcaatattgcactgaaagtgaaaggcagaatggttgtatgtgtactttaagtacttttatgcatatggattctactgaatgcatgttgctttcataccatcataaagtcaaaatattgtaagtccaaccattataagctgggaaccatccatatttgaggtacatacccatgaatatatttatgggtttatttcttgcttcttaattctattccatttatatatatgtctgtccttatgccagtaccacaaagcattgataactgtagctttatacgaagttttgaatttgggaaatgtgagttatccagctttgttattttttaggattattttggctatttgaggtcttgcacaattacacatgaattttaagattggcttttccatttctgccaaaaaaaaaatggccattgggattttgatgcagattgtattaaatctgtagatcactttgggtagtactatcatcttaataatattgtcttccaattcatgaacacaggatatattttcacttctttatgctgtctctaatatctttcagcaatgttttgtagttttcagtgtacaagtcttttacctccttagctgaatttattcctaagtattttattctttttgatgctattttaaatagaattattttttattttgttaatttcatctcagattgttcattgctagtgtgtagaaatacaactgatttttgcacgttgatcttatatcttgcaactttgctgaattcgtttattagctctatagtgttttgtggattcttcggggttttccatacataagctcatgttcatctgagaataagatagctttacttattccttttcaatttggatgccttttatttctttttttcctaattgctctggctaagacttccaatacaattttgaatagaagcagtaaaagcaggcattcttgtctcgtttctaatgttagggaaatatctttcagtcttctaccattgagtgtgatgttagttttgggtattttatgaatgctctttatcatgttgtggattttctcttccatttctagtttgcttagtggtttttttttttttttttttttttggtcatgaaaaggtgctcagctttatcaagtgatttttctgcatcaaccagaatgaacttgcaggggtttttttccctatattttattaatgtggagttgactgggggattgattgtcttatgttgaaccagtcttgcattattgggataatttccacttgagcatgggctataacctttataacatgctgctggatttggtttgctaatattttgttgaagatttttgcacctagatgcataagggaatattatactcacatattcaattacatgcaatttgtaattttcttttcttgtgatatatttgtctggctttgatatcaagatatggtggcctcatagtatgagttgtaaagtttactctccttttctgtctcttggaagagtttaagaaggattaatgttaatccttccttaaacatttagtagaatttaccagtgaggccttctagcacaatgcctggcacataatatatggaatctaggatttgtatagtcagtcattaactatttgttgaattaataaattgtctccccaagcaggtttctaatcaaggcacaaagattgagtaacgaatgaaggcaaagccaatgtatacagggtattagttttctaatgctggggtggcaaattaccacaaacttaatatggcttaaaacaacacaagtttattatcttacagttcgatagggcagaagactgacccaagtcttactgggctaaaatcaaggtgtcatcagggctgcatttctttctggaagctctagaaaaggatcctttttcggtcgcctgtagtcccagctactcgggaggctgaggcaggagaatggcgtgaacccgggaggcggagcttgcagtgagcggagatggcgccactgcactccagcctgggcgacagagtgagactccctctcaaaaaaaaagaaaaagaaaaggatcctttttcctttcttttccagcttctagaggccacacacattcattaactcatggcttccttcctccatcttcgaagccagtaacattgcacctttgtgactattcttaagtagtcacgtctccctttgactctcctcttctgcctctctctctcactttcaaggcctcttgtgattacattgggccgacctggataatccaggatattctccctattttgacatcagctaattggcaaacttaattccatctgcaaccttaaatccctcttgccatgcaacataacacagtcaaatgttctggggattaaaatgtggacatcactgagagatcatattcttcctagcacatacggtttagtcacaagttaatgatcaacatttattagctatataatactcttaagttcaacataaactttttggatgctgataaaacggaatggcattttacattgatatatacttcatttcaaaacttcttctacttctcaatgattattctgtagcaacaaatttcttttaaatcagaaatttggaaacataacgagacctatctcaaatcaaagatgactatccccttttggagtcagactacacattcattattttagtcaaaatgagacataaaattcaggcccccaagagctgccagtacccacttacgcaggaggtagctagacgaaacaggtagctttctacaaatgattttgcaccatcccaccccagagaggtggtttggagtgtttacttattacctgggatttaattatactagctcttgcaaaagccaaatctaaaggccataaatagaaggtcaaattttctcctatatagaaaggagagcagcagagaaaacaaaatccttggtaaatctttaaacaaagttatatggtttgaatatgttattcattctattttaaccccccaatacagatatatttataaaaaagaatattgtgatttctggtataacttgtttaggaacaaagccacaaatttattaatattttctattccctgggaagaaaaaaatgctacatggcagaataattttttaaaatttccagccgggcacggtggcttatgcctgtaatcccagcactttgggaggccgaggtgggcggatcacaaggtcaggagattgagaccatcctggctaacacggtgaaacaccgtctctactaaaaatacaaaacattagctgggtgtggtggtgggcgcctgtagtcccagctactcgggaggctgaggcaagagaatggcgtgaacccgggaggcggagcttgcagtgagccgagatcgcgccacggcactccagcctgggcgacagagcgagactccgtctcaaaaaaaaaaaaaaaaaaaaaattcccatgatactaaactgatgtgtgatcatataatagacttacactgatacctattttagtgtattcaagcagataaaaaatcccaggtgttctatgagtgatatcattttcagtatttcttatgctgtatgccatggtttaaatctaggcctttcgaattggcattactaccatatttctcaaactgtattccctttctcttgaatatgttatgtaattttgtccagaacccagacatgtcaaggtgtcaaatcccacgttttggatactaacgtgtctcattaattcatacagtgggatcattcattaatgcccacattatagactctctctctctctacacacacacacacacacacacacacacacacacacactacattcttagaagatcattctgagaccagggtggaggataggctgtgcattcccagtactctttcacagctgactgtgtcctctgccagtgttttcaaactttactgcttatgaaacagctaagggtcttattaaaatttagattctgattcagtagaactgacatggtgcccaaggaactgcatctcttttaaaaaatctttatttaggtataattgacaaaagttgcatatatttaagaggtacaacttgatgttttgatatattttgtttttcatatatgatgtttgatacattgtgaaatggtcaccacaagcaagctaattaagatatatctatctctttgcctagctacctttttttgtggtgagaacatttatgacctactcttttagcaaatttcaagtatacaatattgtttactatagttactatatcgtacattagatctccagaactaatttatcttgcataattgaaattttgtaccctttgatcaacatctccctgtttcccccacaccacagtccctagcacctaagattctactgtctgcttttatgagtttgaccatcttagattccacatatgaggtcatgaagtatttttctttcagtgtctggcttattacacttagcataatattttccaggttcatccatgttatcacaagtgggaggattttcttctattttaaggccaaataatattttataattgtgggaatattccatcagatatatatatatcagattgtctttatccctccatccatcaatggacacacttaggttgtttccatatcttgactattgtgaatactgttacagtgaacatgggagtgcagatattcaacatactgattttgtatcctttggatatataacagaagtgagattgccagatcacatggtattcatttttagtttttttgaggaacctctatgctgtttttcataatggctgtaccaatttatttttgcagcaacagtgtacaaaggtttccttttctccacattaccaccaacatttgtcatcttttgtctttttgataatagctatttgctatggtttgagtgttttccccaaaaaacatgtgttggaaacttaattcccaatgcgacagtgttgggaggtagggccgaatgggagatgtttaggttatgaggactccaccctcatgaatggattaatgccgattacaaaagcacctaaggctgtgaatttgaattgctctctcttgccctctttttgcccttctgccatgttatgatatagaaagaaggcctttgccagatgctggcctcttgatcttggactgcccagcctccagaactgtgagccaaatacatttctgttcactacaaattactcagtctgtggtattctgtcatagcagcataataaattagagtccataataagttatagtccataacagactaagacactattctaatagatgtgagggaatatctcattgtgttttgatttgcatttccctgtgggttagtgatgctgagcatcatttatctgttggccttttatatttcttcttttgaaaaattctatttgggttctttgcccatttttaattgggttgtttcttactaatgagttgtttgagtttcttacccattatcagatatacagtttgcaaatattttcatccattccataggttgtcttttcactctgttgattatttcttttgctgtgcagaaagtttttagtttaatgcaatcccagtttctatttttgtttttgttgcctgtgcttttggtgtcatataaaaaaattattgcccaaatcaatatcaggtagcttttttcctgttttcttctaggagttttatagtttcaggtcttatatacaagtgtttaatcaattttgagttgaattttatgtatagtgtgagaaaagggcccaatttctttcttctgcatgtggatattcagttttcccaatatcatttattgaagagactctcttttccccgttgtgtgttcttggcacccttgtcaaaaatctgttgactgtaaatgtgtgaacttatttctgggcttttctattctgttcccttggttgatgtgtctatttttatgccagtaccatactattttgattactggagacttgtagtatattttgaaatcaggaagtatgatgcctctagctttgttcttcttgcttaagattgctttgccaggctgcatgtggtggcccacgcctgtaatcccagcactttgggaggctgaggtgggtggatcacttgaggtcagaagtttaagagcagcctggccaacatggtgaaaccccgtctctactgaaaaaatacaaaaattagccaggtgtggtagcaggcccctgtgatcccagctaatctggaggctgaggtggagaatcacttaaacctgggaggcagaggttgtagtgagccaagatcgcaccactgcactccagcctgggcaacagagcaagactctgtctcaaaaaaaaaaaaaaaagattgctttgcctccttggggtcttttgtgatttcatattaattaaaattttttttttatttctgtgaagaacaccattgagattttgatagggatcacatcaaatctatagattactttgggtagtgtggacattttaacaatactaattcttccaatctaggaatatggaatatcttttatttatctgtgtcttctttaatttccttcataaatgttttctatattttcattgtacaagtctttcatttctttggttaagtctattcctaagtattttattcttttgttgctattgtaaataagattattttctaatttcctttgggatattttatagtgtatagaaacaccactgatttctgtatgttgattttgtatcctgcaactttacagaattcatgtattagttctaacaatttttttttgagtctttagagttttctacatgtatgatcatgtcatctgcaaaaagagataattttactattctcttctatttggatgctttttattttatttattttttaaattatattttaagttctgggttacatgagcagaacatgcagttttgttacataggtatacacgtgccctggtggtttgctgcacccatcaacccgtcacctacattaggtatttctcctaatgttatccctcccctagccccccaccccccaacaggccccagcgtgtgatgttccactccctgtttccatgtgttctcattgttcagctcccacttatgagtgagaacatgcagtgtttggttttctgatcttgtgatagtttttgagaatgatggtttccagcttcatccatgtccctgcaaaggacaggaactcatccttttttatggctgtatagtattccatggtgtatatgtgctacattttcttaatccagtctatcattgatggacatttgggttggttccaagtcttcgctattgtgaatagtgccacagtaaacatacatgtgcatgtgtctttattgtagaatgatttataatcctttgggtatatgcccagtagtgggatttgctgggtcaaatggtatttctagttctagatccttgaggaatcgccatactgtcttccacaatggttgaattaatttacactcccatcaacagtgtaaaagcgttcctatttttccacaacctctccagcatctgttgtttcctgactttttaatgatcaccgttctaactggcgtgagttggtatctcattgtggttttgatttgcatttctttaatgaccagtgatgatcagcattttttcaaatgtctgttggctgcataaatgtcttcttttgagaagtgtctgttcatatcctttgcccattttttgatggggttgtttgtttttttcttgtaaatttgtttaagttctttgtagattctggatattagccctttctcagatggatagattgcaaaaattttctcccatcctgtaggttgcctgctcaccctgatgatagtttcttttgctgtgcagaagctctttagtttaattagatctcctttgtcaattttggcttttgttgccattgcttttggtgttttagacatgaagtctttgcccatgcctatctcctgaatggtattgcccaggttttcttctaggatttttatggtcctaggtcttacgtttaagtatttgatccatcttgagttgatttttgtaaaaggtgtaaggaagggatccagtttcagttttctgcatatggctagccagttttcccaacaccatttattaaatagggaatcttttccccattgcttgtttgtgtcaggtttgtcaaagatcatatggttgtaactgtgtggtgttatttctgaggcctccattctgttccattggtctgcatatctgtttggccccagtaccatgctgttttggttactgtagccttgtagtatagtttcaagtcaggtagcatgatgcctccagctttgtccttcttgtccaggattgtcttggctatgagggctctttgttggttccatatgaagtttaaagtagtgttttccaattctgtgaagaaagtcagtggtagcttgatggagatggcattgaatctataaattactttgggcagtatggccattttcatgataatgattcttcctatccatgagcatggaatgtttttccatttgtttgtgtcctctcttatttccttgatcagtggtttatagttttccttgaagaggtccttcacatctcttataagttgtattcgtaggtattttattttcttagtagcaattgtgaatgggagttcactcatgatttggctctctgtttgtctgttattggtgtataggaatgcttgtgatttttgtacattgattttgtaccctgagactttactgaagttgcttatcagcttaaggaggttttgggctgagatgatggggttttctaaatatacaatcatgtcatctgcaaagagagacaatttgacttcctcttttcctatttgaataccctttattgctttctcttgcctgattgccctggccagaacttccaatactatgttgaataggagtggtgagagagggcatccctgtcttgtgccagttttcaaagggaatgcttccagtttttgcccattcagtatgatattggctgtgcgtttgtcataaatagctcttattattttgagatatgttccaccgatacatagtttattgagagtttttagcatgaaggggtgttgaattttatcgaaggccttttctgcatctattgagataatcatgtggtttttgtcattggttctgtttatgtgatggattatgtttattgatttgcatatgttgaaccagccttgcatcccagggatgaagccaacttgattgtggtagataagctttttgatgtgctgctggatttggtttgccagtgttttattgaggatttttgtatcgatgttcatcagggatattggcctgaaattttctttttttgttgtgtctctgtcaggttttggtatcaggatgatgctggcttcataaaatgagttagggaggattccctctttttctattgtttggaatagtttcagaaggaatggtaccagctcctctttgtgcctctggtagaatttgtctgtgaatccgtctggtcctgtactttttttggttggtaggctattaattactgcctcaatttcagaacttgttataggtctattcagggattcaacttcttcctggcttagacttgggagggtgtatgtgtccaggaatttatctatttcttctagattttctagtttatctgcatagacgtgtttatagtattctctgatggtagtttgtatttctgtgggatcagtggtgatatccccaatatcattttttattgcatctatttgattcttctctcttttcctctttattagtgtggctagaagtctatctattttgttgattttttcaaaaaaaccagctcctggattcaatgattttttgaaggtttttttgtgtctctatctccttcagttctgctctgatcttagttatttcctgtcttctgctagcttttgaatttgtttgctgttgcttctctaattctttaattttgatgttagggtgtcaattttcaatttttcttgctttctcttgtgggcatttagtgctgtaaatttccctctaaacactgctttaagtgtgtcccagaaattctggtacgctgtgtcttcattctcattggtttcaaagaacatctttatatctgccttcatttcattatttacccagtagtcattcaggagcaggttgttcagtttccatgtatttttgtggttttgagtgtgtttcttaatcctgagttctaatttgattgcactgtggtctgagagactgtttgttatgatttccattcttttgtatttgctgaggagtgttttacttcgaattatgtaatcagttttagaataagtgtaatgtggtgctgagaagaatgtataatctgttgatttggggtggagagttctgtagatctctattaggtctgcttggtccagagctgagttcaagtcctgaatatccttgttaattttctgtctcattaatctaatattgacagtggggtgttaaagtatcccactattattgtgtgggagtctacgtctctttgtatgtctctaagaacttgctttatgaatctgggtgctcctgtattgggtgcatatgtatttaggatagttagctcttcttgctgcatttttccctttaccattatgtgatgctcttctttgtctcttttggtctttgttggtttaaagtctgttttatcagagattaggattgcaactcttgcttttttttttgctttccatttgcttggtaaatattcctccatccctttattttgagcctatgtgtgtctttgcaagtgagatgagtctcctgaatacagcatactgatgggtcttgactctttatccaatttgccagtctgtgtcttttaattggggtatttagcccatttacatttaaggttaatattgttatgtgtgaatttgatcctgtcattatgatgctagctggttgttttgcccattagttaatgcagtttcttcatagtgtcaatgttctttacaatttggtatgtttttgcagtggctagtaccagttgttcctttccatgtttagtgcttctttcaggagctcttgtaaggcaggtctgatggtgacaaaatccctcagcattcggttgtctgtaaagaatttcatttctccttcacttatgaagctttaagaggtttaattgactcacagttctgcatggctgtcccataagtcccatgttctttcctcaggaaacctacagtcatagcagaaagggaaataggcacatcttacatggcagcaggcaagagagagtgtgtgaaggaggaactgtcaaacacttataaaaccatcagctctcataagaactcactatcaggagaacagcgtgggggaaaccatccccatgatccaatcacctcccactaggtccctcccttgacatgtgggcattatggggattacgattcaaggtgagatttgagtgggaacatagagccaaaccatatcagtatctaaaaggaaaaaccttcagtttttccacatttggttatgatatcagctgtgagcttttcctatatggtctttattgtgttaagttccttctgtatctatcttgctgaaagtttttattatgaatggatatctagttttgtcaaattctttttctgtattgatcgaaataatcatgtgtttttcatctttcattctgataatgtggtatatcacattgattgatttgcccatgttgaaccatccttgcatcctagggataaataccacttgttcatgatgaatgatccttttaatgtgctgttgaatttggttggctggtgttttgttgaggatttttgtatccgtgttcatcagggatattggcctgtagttttctttcttttcttttcattttctttttctttctttttttttttttttttttttgagacagagtcttgctctgtcacccaggctggagtgcagtggtggtatgatcttggctcactacaacctccacctcctggattcaagcgattctcctgcctcagcctcctgagtagctgggactactggaacatgccatcacacccagctaatttttgtatttttttagtagagatgagttttcaccttgttggccaggctggtctcgaattcctgacctcaagtgatttgcctgcttcagcctcccaaagtgttgggattacaggcttgagccaccacacctggcctggcctgtagttttcttttctagtgttgtttttgcctggatatggtatcagggtgatgttggctaataaattgtattttgaagtgttctctcttgtattttttggaagagtttaagaaatactggtattaatacttcgttgaatgtttgatggaattcatccatgaagccattggtcctgggcttttctttgttggaaggtttttgattactagatttaatatccctatttgttgttagtctgttaaggctttctatttctttgttattcagttttggtatgttatatgtttctaggaatttatccatttcctctaggttaaccaatttgttgacacttataatagtcccttatggttctgtctgtttctgtgacatcagttgtagtgtctcctctttcatttatattttatttatatgagtcttctctctttttttcgtagtctagataaggacttgtcaattttgtttattttttcaaaaaaatcaactcttagttttgtcagttatttccaattgtttttttattctcttttttatttatttctgctctagcatttattatctcctttgttctgctacctttgggcttagttttttttttcttctttttgtagttcctggaggtgataagttgggttgtttatttcatatgtttcttctttttaaatataggcatttattgctataaatttccctattagtatgcttttactgcatcctttaagttttggtatattatcaagattttggtttcttctgtgacccaatggtcgttcaagaatgtgttgtttagtttccacatatttgtgaattttcgtgttttcttattgttattgatttgtagtttcaatccattgtggtcagaaaatatacttggtatgatattaatcttcttaaatttattatgacttgttttgtgacctgaaaggtgatctgtcctgaagaatgttttgtgtgtgcttgataattctactgttgggtggaaagttctgtatatacattttaggtccattgggtctattttattcttcagttctgttttgtccttattgattttctgttgggatgatctattcattatagagagtggagtattgaagtcaactatattatattgttatctatttctccttccatgtctgtcaatgtttgctttatatatttaggtactttcgtgttgggtacatatatatttataattattacatcttcctgttcaagtgacccttttattatataatgaccttctatgtctcatgtcacagttttttacttaaagactattttttctcatacaagtatagccacccctgctctcttttggttacagtttgcatggcataactttctccaccccttcactttcagcctatgtatgtccttaaatcaaaagtgagtctgttatcaacaacatgtagttgggtcctgtttatttttgtttcttacttcccatctctgaattgttggctttttaaaaagcccattcagttactctgtgtcttttgactggggagtttagtcaatttacacttaaagtaattattgataggttaggactttctgttgccattctgttaatagttttctgttttgtagttttcttgttcctttcctctttttctttctttgtggtttgatgatttttgcttggatgtgttttgattcttttctctttatcttctgtatatctactgtgtgggggggcggtcgggggggttaccacagggatcaaattgaacactttatagttatggcagtctgttttaagctgacaacaccttcaatcacatacagaaactctatactttactcattccccccgccacaactttatgtaatcgacgtcatattttacttccttctatattgtgtttccattgacaaatttctgtcactatagttactattactatttttgtcttttaatttataaattaatattaatagtgatttataacaatcattatagtgttacaatagtctatgtttctctttatatttacctttagcagtgaaaggattcatatgcttttgtgttactgttttttttttatttcaacttgaagaactattagcacttcttataaggcaggtctcatggtgacaaaccccctcagtttttgtttgagaaaggctttatctttgtgttcattcttaaaggacagtttttccagataaagtattgttgattggatttttttctctcagtactttgaatatatcatcccactctttcctgacctgcaaggtttctgctgagatatccactcatagtcttatggagctcccctataggtgacaattcactttcttcttactaccccaaaattctcttttgtctttgttgaaaatttaattataatgcatctcactgtagacttctgtgggtttaatgtatttggttatctttgggcttaatgaatccagatggcacttcccctccatagatttggggagttctcacctattatttctttaaataagtttcctttctctctctcttctccttttaagatttctataatgcatctatcattttgcttgatgatgtcccataagtcctctgttcttccttcactctttctcattgttctttttattccgctaactagataatttcaaatgacttgtcttcaagtttacaaattctttcttctgaatgattgagtctgctattaaagatcgctattaaattttttagttcagtcattcttcagctatattcagcaatattctttagctacaggatttttatttggttcttttttatggtttttatttctttattaaacttctaatgttgttcatgtattgttttcctcattttgttagtcgtcttcctgtatcctcttgtagctaattgagcttctttaaatgattattttgaattctttgtcaaaaatttcatgaatctccatttcttcagggttggttactggagctttattagttccctttggtgatgtcatatttgcctgattcttcatgatccacatagcctagcattggtatctgtgcattggagtgagctgacacctcttctggtctgaagttgggtactcagacaatgggcccattaccagggctttggataggtgtagctctcactgggtccttgagtgggcaggactgcctgcagaccatgatgcagtgggcctggagctgggtcaaagggctgcttcagggtccccacttgggcccacagtcagtgggcctgttatgggggcacaggtaagtgtggattcaggcaggactgtctccagaacatggtacagcaagactggagttggctcacagggttacttctgagtccacagtcaggtctagttggtgggcctgcttccagaggtggactggcatgactcccacctgtttcctaagtaggcaaaacttccccaagaccatggtagtgtggtactgaagctgctttaggtacagggctgcttcagagtccacagttgggagccctgttactggggttgccaatgggagttgctcctcccagattcctgggcagatagggatagtggtaggaccacatacaaacaactctggagctaagtccccagggtggtgggctgcttctgggtccacaaccagaactacagttgacaggcctgccgctagaatgtgggcctgccttattaaagtattcatctttgttcttgagctctaccagggtttctcaacctcctacctgaatcccaaggctcccacaaagacacttttgtccatagatcattgtcaaattattgttcctgtgggggaacaagagctagggacctcctatcccatcaactcactgataccgttctcctgatgctgcattttgaattgccctcaggtgatgctgctactcctggtctgtggaccatgctggagtagcagagcccaaatggcttcctcaacttttatgagccttttacaggaactcaaagtagaaaataacttcacttgccccagacctaataatttcctttgttcccacttcttcttggtgctttcctcctttgtgtctaccatcgtaacatccatctaaccatagttgtcttatgtagatgttggatgctgttgagaaacgcacaaagcaaattagaaggaagatatgattgacagaaattgctttttactctgtattcactttccatgtatttgtgctaatctctccatacaggtcttctttggcaatgtggattcatctgggataaaacacaatatttttaaccctccaattattgctcgatacatccgtttgcacccaactcattatagcattcgcagcactcttcgcatggagttgatgggctgtgatttaaatagtaagtgccaagtcatcccatatccttcttccctcaaccatgggtagggtgactaactgttctagttatcctgagactgggggaggggttcccggtatcaggacacaaaattgtcagtgctaaaaccagcatagtcctgggcaaacccagaaataccattcaacccagcagtcccatcactgggtatataatcaaaggaatataaatcattctgtcataaagacacatgcacgcatatgttcatttcagcactattcacaatagcaaaggcatggagtcaacctaaatgcccatcaacaacagattggataaagaaaatgtggtacatacataccatggaatactatgcagccataaaaaagaatgagatcatgtccttttcagcaacatagatgcagctagaggccattatcataaatgaactaatgcaggaacagaaaaccaaatatcatgtgttctcataagtgggagctaaacattaaatgcacatggacacaatgatggacactcaggaggggagaggttgggaggggggtgtgggttagaaggttatgtattgtgtactgcactcactacctgagtgaggggatcattcatacaccaagcctcagtgacatgcaatttacccatgcaacaaacctacccatgtacccctagaatctaaaataaaagtagaagaagaaaagaaacaaagaaaattaaagagtcacacaaagtgggaagagctggctggaaaacagatagcaataacagaattggccgggcgtggtggctcacacctgtaatcccagcactttgtgaggccaaggcgggtggatcacgaggtcaggagatcaagaccatcctggctaacatagtgaaaccccaactctactaaaaatacaaaaaattagccgggtgtggtggtgtgcgcctgtagtcccagctactcgggaggctgaggcaagagaatcgcttgaactcgggaggcagaggttgcagtgagctgagatcatgccactacactccagcctgggtgacaaagcgagactccatctcaaaaaaacaaaaacaaaacaaaacaaaacaaaaaaccaataacagaatctgtgcaaaagttaaaacctgagaaatgatattatgatgacagtagccctagaatatcagtggaagctgctcagtataactgaggctgaagcatgtccttgtgataaccttcttttttcttttctttgaggttgcagcatgccattgggaatggagagtaaagcaatatcagatgcacagattactgcttcatcctactttaccaatatgtttgccacctggtctccttcaaaagctcgacttcacctccaagggaggagtaatgcctggagacctcaggtaagaggcaacagatttactgtttaactgactcagagcagtggttggggaaaaaatcggggaaggccttgactgtttcttctgaggtatttctgtcaactgttagttctaaaaagtgtgtcaaggaagtttggttatgggcagacaaccacacaggcatttgggggaaatgatctctaattgaacctcctggaagaagaatctctatatctagtactgagctaatatctgtcaaagaattgtagaagctaaagtccattttacagataaatatcaacaattagctttctttccaggtttctcattacatcaatgaaaagtaaacatttactgcacatcttagtatccctaggatgagcctagggatacaaaggtgaattgtgaaaaattttggccctgaagttgcttagagttgaataagagagactgactagccaatagaaagtggaggctgggtgcggtggctcatgcctgtaatcccagcactttgggaggctgaggcgggccgatcacaaggtcaggagttctagatcactcttttgctgaggcaggataatcgcatgaacctgggaggcggaggttgcagtgagctgagatcatgctattgcactccagcccaggcaacagtgcctgactctgtctgaaagaggcagagagagagagagagagaaagaaaggaaagaaggaaggaagaaaaagaaagaaaggaaggaaggaaggaggccgggcagagtggctcacgcctgtaatcctagcactttgggaggcctaggtggcagatcacctgaagtcaggagttcaagaccagcctggccaacctggtgaaacctcatctctactaaaaatataaaattatctggacatggtggtgggcacctgtaaccacagctactcgggaagctgaggcaggagaatcggttgaactcgggaggcagaggttcagtgagctgagatcatgccattgcactacagcctgggtgacagagcaagactccgtctcaaaaaagaaagtagagtgagaagtgctgtggtatggttaagagggatttgggaatttctgggagtaaatggtgaccaagaggctactagtccaactctattgccctcaggtgaataatccaaaagagtggctgcaagtggacttccagaagacagtgaaagtcacaggagtaactactcagggagtaaaatctctgcttaccagcatgtatgtgaaggagttcctcatctccagcagtcaagatggccatcagtggactctcttttttcagaatggcaaagtaaaggtaagctggtctccttggaaagaaagaaagaaagaaaaaaaataccacctctcctagagcttaacataacataaaaaggttgatatatgaccaaattttcagagcaaaatttattaagtacctatggtagcaagacattgtaaaaggcattctgagagaacacagtgactttaagaaaaaggtaaaatactgagaaaagggcagagtagatccaagagttaattctcctcatcagcaccttgattcccaagcctttttgacctttaagtttagtggtccaggaagtcttcattcttaatctgggtttgctggataattcaacaaattgtcctgattaaaagacatgacataaagtcttatcaccccatgagtaatgggggaaggaatagttcctctctttggtattttttatattcttttttcaccaagaattaaccatgatgtggtccttaccaatctctctaatacagtctcttgccacttggctctttaagctccatccatactaagaaattctcaggtcactaaatacagccattatatctcataccaggcttttaaatagatactatttcttctacctggaacatttttctagctaccctctactgccactttcacctgactcattcgttaagtctcaggtaaacatcatgtccaagaagaattcccttatccatcaaggctggatgaaagacttcaccaaactggcagtttggtgaactgaagtctagacattggatattctagaagaaaaattcccatttaaaaaaggttatatctctgattagtgccacaacatgatgaactttcaaaatatgctaagtgaaggccgggcgcggtggctgatgcctgtaatcccagcactttgggaggctgaggcaggcagatcacgaggtcggtaaattgagaccatcctggctaacacagtgaaaccccatctctactaaaaatacaaaaaattagccaagcgtggtggcgggtgcctgtagtcccagctactcgggaggctgagacaggagaatggcatgaacccgggaggcagagcttgcagtgagccgagatcgcaccactgcattccaacctgggcaacagagtgagactccatctcaaaaaaaaaaaaaaaagaaaatacgctaagtgaataggccagacataaaaggatagatattatatgattctacttatatgagtgtgttagtcagggatatccaaagaaatagaaccaataggagattctgtctgtctgtctctctctctctgtctctctggatgagctaaactgttttagttcaagactgaaagcaggaaaaagctgatgttccagtccaaaggcagacaggcagcaagaatactttcttacttggggaagactcagtctttttgttctattcaggccttcaactaattggatgatgcctcccacattagggagagcaatctgctttactcagtctactgacttcgatgttaatcccattcaaaaacaccttcacagaaataaccagaataatgtttgagtaaatatctgggcaccttatgaccaagtaaagtagatacataaaattaaccatgacaagtccaccccttgtcaatgtagcacccatcatacacatctcctttatctctaagtagagacaaaaatgaggtcataattccacctaacatgatataacaaaacttggctggtattgataactaccttcttctactacccattctgtattgactttgccttcagcaagcatctcagctgattgtggttctttacctgatgaggtgacccaaacctttattcctgaagagcctgggccactagtagtcctgcatggattgggttgctgtagtttcccattgaccagaatcatagggcctggtaatactaagagacactctaagggatctattgtattccagacacactcttccatacctccattgtgaagcagtagttcagtttccttccaggaaggacaaaacgctgccccttccatgatgaacatattccaatgtaatcaacctgctgccagatagctggctgatcatcctgggaaatactgccatactgaggactctgtgtttgtctctactgctggcagattgggcacttagcagtggccatagccaggtcagccttgttgaatagaagtccatgttgctgagcccatgcatagcctctatccctgccaccatggctactttgttcatgagcccatcaggcagtgacataggtggctgagtaaaaaggatgactggtatccacagaacaggtcatcatatctactttttttttgagatggagtcttgctctgttgcccaggctggagtgcagtggcacaatctcagctcactgcaacctctgcctcccaggttcaagcatttctcgtgcctcagcctcccgagtagctgggactacaggcacgcatcaccatgcctggctaatttttgtatttttagtagagacagggtttcaccatgttggccaggctggtcttgaactcctgacttcaggtgatcctcccgccttggcttcccaaagtgctgggattacaggcgtgagccactgcacccggcccatcatatttacttgattattgaaatccttatctgctgaggtcacccttcgttgagcactcacatgggacataaatatattcacatcctttgcccattcagagagatctgtccacatacctcttccccaaatttctttgtcacctgttttctaatcatgttccttccaagtccctatctggacaaagcactgactacagcccattacttgacatataattgcacacctggccatttctccttctaagcaaagtccacaaccaggtacactgcctaaaattctgcccactgtccttcatgggtatctcagatcgggactgtccacttttgtgtagtacctgcatatcgtgcagaaccgtctgtaaaccaggcccaagactcctcttcctctgtaaactgatcatagggaactcccaatggggccataagtgcaggctgggagagagaaggcagggtagcagaaacaggcaccatggacatttgggctacttcttcatgtaatttacatgtgttttcagtacctgctcagacatgatcatgtatataccacttccatttgatgatggagtgccattgttcatacccaactttatggcttggtgggtcagataacacctagttcatgatgggcagttcaggtcacatggcaacttggtggtctgtggctaagcattcagtatctactaaggcccagtagtaggccaagagctatctcacaaaaggagaacagttattcacagaggattacaggaggatttctcactacagtagcccctgctccataggtcagggaaccaatgtgaagatcctgctagctgctcaatatatctgttccaattacgcattccaggactggggaaataaccacaagatagtctcacagatcctctgcatccactttgagatggacttgagctaaaattccattgatcatttgaccctccataagcccatactctgactggtggaccacagtgacattttgggtctcctgaaattagtgccagttcagagccattgtccagtagtccctgaaaggtctgattaattatttttcttcagtgcacatttattctgatagaaaggccatatgtccctttggggaaggctgagagaaagagtggcagtattcttggcagtgtaccagagtccttcctcaaggagactgagcctccccttcattcaaggagtgctgggtctgtaaacctgctcaagtctgggaattgattgagaggccgtgactctgtttttattattcaggttagacttttgttcacttgacctagaacttttccacttatgcagttcaagaatttggtaggcattctatctatatcacatctaggaacactataatctactagccaacaccataggtctgtgcaagtcatactattctaactgctgctttgactctgctgtcccttatggtaaccacacttaccttgcctttggcagttgagtgctgcccattggccccttccaccccaggatccaattattcccattgtatttaggttttctaattcagtgactgcaggtcctgctgtaaggtgtcacctacagagaagagtgatcacagagcccttcaaggatgctgaggttcccctcacaaatttattcctcaaagtaatagtgagatctgtgtcttctgaactctcccagtgttggtgagtatgtcttaaatgacaaattcactctagcatttcaatctcctttcttctacattaaaccagggcaagtctgaaatttctagtttgctcactgtgggccatcttttggtctgtgtttcagccaaccaattaaactgttagaggccttcctaattccctgagatgcaacattaagtccagaatctctgcttagtgggcccatgtcaataaatttggcctaatccaactttacgtgccttccaccgttatctcacatccttagtacccattcctatacatattctctggattcctgcttgtgtaaattagaaaactcaagtcatgattttggagtgtagtgcaccttgtcatgggtcaccttcatacctcacctcgcctgctgggacttgagtgtagttatagatctaataacaaagaggggtggtagggtgggtcctgaaggaatcagcattatcttgcatggcagttgcctcaggggaagccattacagtttcctcaggcagtgcagggttaatccacttagactggagtagagatactgccaccacagggctggagagaaaactttcactgacaaagaagactcatcaatatttaggagctcaatgtccccagcttaatcagggtcttccacacatacctaatccaacttgtagtgccccattctttcccaatcactgcccttgctttaacagtagacaccctgcaaagctgggagtttggcttgctttgtaattcagttagtcacaggatgagatttggcatttgattttcagcaatctcagctctgtggctacagtagataagggtctccttcagggcatacatagaatctgtcaagtcatttatgcagctcttgagctgggaattcaaattcctgagctcctccttttctttcatcactttttccagcaacattaggagcaaccgactaatcccatcatattcattagtttgacaaatatgttcacaagtgtcaatatacatagtcaccaagacccttgcttcttaaaagtagttgattaggagtatccaatggagatattttgcatatacatattttttgagatggagtctcgctctgtcacccaggccggagtgcagtggcatgatctcagctcactgcaacctccatctcccaggttcaagcgattatcatgcctcagcctcccgagtagttgggattacaggcacctgcctaatttttgtgtttttagtagagacagggtttcatcatgttggccaggctggtctcgaactcctgacctcaggtgatccatccacctcggcctcccaaagtgctgggattacaggcgtgagccaccgcgcccagcctggcctacatatttctattgccagatcatgccatggacaatttttactactgaaaatagtcattagtgtctttaaatttcatcaggttacagaaccaattccagaaatccaataacaaatttataaaatttatccttaaaattctgttcctttagaatcactcttggtgtgaaaatctgtattagtcatggttcccaaagaaacaaaaccagaaccaagaggagatacatacacacacacacacacacacacacacacaaggaattagctcatgtgattatggagtctgccaagtctcaagatctgcagggtgagttggcagcctagagaccccagagagctgattcgtagttccagttcaaagaccagcaggctacagacccagaaagagttaaaatgttttagttcgagcccaaaggcaggaaaaaaactgaagtcccagtttaaaggtagtcaaatagaaggaactgtctcttactaagaggacagtaagcctttttgttatatttaggccttcaactgattggataagttctacccacactggggagaacaatctgctttacttagtctaccaattcaaatgttaatctcaccaaaaaacactctcacagacacacataaaataaagtttaatcaaatatatgggcaccccatggcccagtcaagttgacacataaaattaaccaccataatgaggtatctagagcaggcaaattcataaagacagaaagtagaaaagaggttaccagggtcttggaatggggaagaaatggagagttatttttaatgagtacagagtttctgtttggggtgatgaaaaagttctggaaatggatagtggtaatgggtgcacaatattgtgagtatacttaataccactaaattgtacacttaaaaatgattaaaatggtaaattttatgtatattgtacaacaataaaaaaggctatatcactgacaatgcattgttgtatttagcaaagaaaggggaatctccagcctccccatcaacaaaaacccccacaaacttctattttaaaataatgagctgaaatcatagcggagaggtgaataatgagcaaatataaaaaggaagacctttcctcagacagaatgcccatattaatgttgttactggaagactaagccttgagcaaaatgcaaggagaactcagtgtgagaattctgcattgtcatgaatcccagaaggaagctagagaagttgcagataaatattatcctctggcacctggaagaaccattctcaacctactctagaaaaaaagcacctccagtttaggcctccaggattcctacatattaaaattataagatcacagacatagatcagcaaacatgcaagacaacaagacaacttgagtacaagtgaacagaaacaatcaattcagatttaaaacttgaagaacaccagatattgacattatcggatacataatatgaaataattatgtataaaatctttaaagtaataacatatggaaacatgaaaataaaagacaaattatccaacattattaggcagttgaaaaaaaccattgcaggttacaaagtcaacatgcaaaaatcaattgtatttttatatactaacaattacaaatatgaaaaggaaaacagaaaagtctatttacaatagcatcaaagataatacaatatttaggaataaatttaacgaaggaggtgcaagtcttgtccactaaaaacaaaaaaacccagttgaaagaaactaaagaactgtctggtctgaagacagcaaatatggaaaattagcaactagaaaaaaattaaaaattaaaaattaaaagagaaattaaataactaaataaatgaaaaggcatcctggatttatggatttgaagacataatattcttaagataagaatattaccacaaaccatttgcagattcaaagcaagcattctgggtttttttgtttgtttgtttgttttttgatttgagacggagtctcactctgtcgctcaggctgcagtgtggtggtgcaatctccactcaccataacctctgcttcctgggctcaagcgattctccggcctcaaagcattctctatcagaatcccaaagacatttttttttttgaggaatagaaaaatctatcctaaaattcagatggaatttcaagggaccctgaatagccaaaacaatcttgaaaaagaacaacgttggaggagtcatacttcccaatttcagaacttactacaaagctacaagaatcaaaacagggcagtacttacataaatatagacacatagatcaatggaatagaattgagagtccagaaataagcctatacatctatggtcaattgattttcaataaaagtgccaagaccattttgtgggaaaagaatagtctcttcaacaaatggtgctgggacaattggatatccacatgcaaaagaatgaagttggatctttaccatatacaaaatttaactcaaggctggatgtggtggctcacatctgtaatcccagcactttgggaggctaaggctggtggatcacttgagctcaggagtttgagaccagcctgggcaacacagtgagactctgtatctacaaaacaagaaaaaaaaattagctggcatgatggtacacacctgtagtcccagctactagggaagctgggataggaggatcgcttgagcccaggaggtggaggctgcagtgagccatgatcgcaccactgcactccagcctgggtgtcagagcaagaccctgtctgtaaaaaatcatttaactaaaaatgtatcaaaaaactaaatataaaagctaaaaccataaaactgtaagaaaaaacaaagaggtaaattgttatgatactggatttggcaatggtttcttagatgtgacaccacaatcacaagcaacaactctataaaaatatatatagtaggcatctttaaagttaaaagcttttgtacatcaaagaacactatcaagaaagtaaaaagatgatctacagtataggagaaaaaaattgcaaatcatatatctgataaagggcctagtatcccagaatataaaaagaactcttacaactcaacaacagaaagacaaccaaattttaaaatgggtaaaggacttcaatggaacttctccaaagaagatatacaaggatccaacaaactcatgaaaagatagacaacatcattagttattagggaaatgcaaatcaaaaccacaatgagatagcatttcaaacctgctaggatggctaaattaaaaaaaaaacaaaaacaaaatgtcaagcgggaaaataacaagtgttagcaagaatataaagaaattggaaccttccttgatgatgagaatgtgaaatagggcagccactgtagaaaatattttggcagttcctcagtaaggaaaacatagaattaacatagacccagcaattctactcctgggtgtggacccaaaagaattaaaagcaggcactctaacaaaaactaatatacaaatgcatatagaagtactattcataatagcaaacaggtgaaaacaattcaaatgttcatcaagtgatgaacagataaacaaaatgtggtctatccatatatggactattatttattcataaaaaatcaaagtactgatccatgctaaaacatggatgctccttgaaagcattatgctaagtgaaagcagccaggcacaaaaggccacattccacttatatgaaatacccagaatagcaaatccatagagacagaaaacagattagtggttgccagaagctggcagaaggagtgaatgtggagtggcttcttaataagtattgaatctccttttggggttatagaaatgttctggaactagatagtggtgatggctatataacattgtgaatgtactaaatggcactgaacttcacactttaaaattgttaaaatggtaaattttatgtttgcgaattttgcaatagataagtcagaagacatgtacattaccataatgagtaacaaactgacagctgatttctaaataatagcaaatatcagaaaataatgaatgatgtcttcacaatgctaaaataaacaatgtgaacccctctctcaaaaagaaaacctaatgaaaatatcttttatgcgttaaagcaaaagaggaaattaggacacagacaggcacagagggacgaccacatgaagatatagaaagaggacagacacctacaagccaacgagagaggccttacaagaaaccaacccttagccaggtgtggtagtgtgcacttgtagttcttgttacaagggtgcagtgagctagggttgtgccactgcactccagcctgggaaacagaacaagaccctgcctctaaaaaaaaaaataaagagaaggagaagaagaagaaaaggaaaagaaaaaaaaaaagaaccaagcctgctggccaggcgtggtaactcatgcctgtaatcccagcactttggaaggctgaggcaggaagatcatctgaggtcaggagttcaagaccagcctgcccaacatggtgaaacccccctctactaaaaatacaaaaattagctggacatgctggcatgcgcttgtaatcccagctactcgggaggctgaggcacaagaattgcttgagcccaggaggcagaagttgcagtgagcccagatcgcgccatcacattccagcctggactacagagggagactccatctcaaaaaacaaacagacaaaaaaaaaatacacacacacacacacacacacacacacacacacacaaaacaagcctgcctaccccttgatcttggacttgtagcctccagaactgtgagaaaataaatttctattgtttaagccaggtgtgcgtgtgaaaatttagaacatatgacaacagcaaaaaagtcagcatgtggataaatagaataaaggattctaaaatccatgtattatctaggaggtaaagatgttaatattaaaccttcataatttgattaatgttgtagtttataggatagccagtaagtaatagaaatacacacaatgtaagactcccaaaatggtagaagaaaaaatatgaaaggataaaatatactcaacaaacctaaatgaaagcaagcaaagagagataaagaaacataaaacaggtaggaaaaatagcaagataagatggtatatttaaattgaaatataacagtaatcatatgtaatatgaatggaccaaatatttcagttaaaagacaaagattgtcagattgataaaaaagcaaaagtagctgggtgtgatggctcacacctgtagtcccagctacttaggatgctgatgtgggaggatcacttgagcccaggaggttcagcctggacaagatagtgagacttgtctctttaaaaaaaaaaaaaaaaagcaaaagtaaattgtgtgcattttatgagtcatatctaaaacattagatacagaaaagtagcaagacaaaaatgggaaaagaaattatgcaaatatctaaaagatatcgattacagctctattgatagcagaaaaatagactttaaagcaagaaagtattgctgaagattaagaatgtgatttcatggctggacgcggtggctcacacctgtaatcccagcactttgggaggccgaggcaggtggatcatgaggtcaggaaattgagaccatcctggctaacatggtgaaaccccgtctctactaaaaaaaaatacaaaaattagccgggtgtggtggcggacacctgtagtcccagttactcaggagggtgaggcaggagaatggcgtgaactcgggaggctagattttaacacatctctcgtcaattgatggaacaatgtatagaaatagaacaattaacatgattcacaagtttgatcttatagacatatttagaaaatagcaccttgaaattgcaaaattacaagggtggttccaacatggccgaataggaacagctccagtctacagctcccagcatgaatgacacagaagacaggtgatttctgcatttccaactaaggtaccaggttaatctcactgtggcttgtcggacagtgggtgcaggacagtgggtgcagcccaccgagcatgagccgaagcagggtaaggtatcacctcacccgggaagcacaaggggtcagggaattccctttcctagccaagggaagctgtgacagatggcacctggaaaattgggtcactcccatcctaatactgcgcttttccaatggtcttagcaaacggcacaccaggagattatatcctgcacctggctcagagggtcccacacccacggagcctcgctcattgctagcacagcagtctgagatcaaactgcaaggtggctgcaaggcagggagaggggcacccgccattgctgaggcttgagtaggtaaacaaagcggccaggaagctcgaacttggtggagcccaccgcagctcaaggaggcctgcctgcctctgtacgctccacctttgggggcagggcaaagacaaacaaaaagacagcagtaacctctgcagacttaaatgtccctgtctgacagctttgaagagagtagtggttctcccagcacagagtttgtgatctgagaacggacagactgcctcctcaagtgggtccctgacccccgagtagcctaactgggaggcacgccccagtaggggcagactgacacctcacacagctgggtacccctctgagaccaagcttccagaggaacgatcaggcagcaacatttgctgttcagcaatattcgctcttctgcagcctctgctgctgatacccaggcaaacagggtctggagcggacctccagcaaactccaacagacctgcagctgagggtcctgtctgttagaaggaaaactaacaaacagaaaggacatccacaccaaaaccccatctgtacatcaccatcatcaaagaccaaaggtagataaaaccacaaagatggggaaaaaacagagcagaaaagctgaaaattctaaaaatcagagtacctctcctactccaaaggaacgcagctcctcgccagcaacggaacaaagctggacagaaaatgactttgacgagttgagagaagaaggcttcagatgatcaaacttctctgagctaaaggaggaagttcgaacccatcacaaagaagctaaaaaccttgaaaaaaaaggttagatgaatggctaactagaataaccagtatagagaagtccttaaatgacctgatggagctgaaaaccatggcacgagaactatgtgacgaatgcataagctttagtagccgatgcgatcaactggaagaaagggtatcagtgattgaagatcaaatgaatgaaatgaagcgagaagagaagtttagagaaaaaagaataaaaagaaatgaacaaagcctccaagaaatatgggactatgtgaaaagaccaaatctatgtctgattagtgtacctgaaagtgacagggagaatggaaccaagttggaaaacactctgcaggatattatccaggagaacttccccaacctagcaaggcaggccaacattcaaattcaggaaatacagagaacgccacaaagatactccttgagaagagcaactccaagacacataactgtcagattcaccaaagttgaaatgaaggaaaaaatgttaagggcagccagacagaaagttcgggttacccgcaaagggaagcccatcagactaacagctgatctcttggcagaaactctacaagccagaagagagtgggggccaatattcaacattcttaaagaaaagaattttcaacccagaatttcatatccagccaaactaagcttcataagtgaaggagaaataaaatcctttacagacaagcaaatgctgagagattttgtcaccaccaggcttgccctacaagagctcctgaaggaagcactaaacatagaaaggaacaaccggtaccagccactgcaaaaacatcccaaattgtaaagaccatcgatgctaggaagaaactgcatcaactaatgagcaaaataaccagctaacatcataatgacaggatcaaattcacacataacaatattaaccttaaacataaatgggctaactgctccaattaaaagacacagactggcacattggataaagagtcaagacccatcagtgtgctgtattcaggagacccatctcacatgcagagactcacataggctcgaaataaagggatggaggaagatctaccaagcaaatggaaaacaaaaaaagaaaagcaggggttgcaatcctagtctctgataaaacagactttaaaccaacaaagatcaaaagagacaaggccattacataatggtaaagggatcaattcaacaagaagagctaactatccaaaatatatatgcacccaatacaggagcacccagattcataaagcaagtccttagagacctacaaagagacttagactcccacacaataataatgggagactttaacaccccactgtcaacattagacagttcaacgagacagaaagttaacaaggatatccaggaattgaactcagctctgcagcaagcggacctaatagacatctacagaactctccatcccaaatcaacagaatatacattcttctcagcaccacatccaaaactgaccacatagttggaagtaaagcactcctcagcaaatgtaaaagaacagaaattataacaaactgtctctcaggccacagtgcaatcaaactagaactcaggattaagaaactcattcaaaaccgctcaactacatggaaactgaacaacctgctcctgaatgactactgggtacatagcgaaatgaaggcagaaataaagatgttctttgaaaccaatgagaacaaagacacaatataccagaatctctgggacacatttaaagcagtgtgtagaggaaaatttatagcactaagtgcccacaggagaaagcaggaaagatcaaaaattgacaccctaacatcacaatttaaagaactagagaagcaagagcaaacacattcaaaagctggcagaaggcaagaaataactaagatcagagcagaactgaaggagatagagacacaaaaaaccctttaaaaaatcaatgaatccaggaactggttttttgaaaagatcaacaaaattgatagaacactagcaagactaataaagaagaaaagagagaagaatcaaatagacgcaataaaaaatgataaaggggatatcaccaccaatcccacagaaatacaaactaccatcagagaatactataaacacctctatgtaaataaactagaaaatctagaagaaatggataaattcctggacacatacaccctcccaagactaaaccaggaagaagttgaatccctgaatagaccaataacaggctctgaaattgaggcaataattaatagcttaccaaccaaaaaaagtccaggaccagacggattcacactcaaattctaccagaactacaaggaggagctggtaccattccttctgaaactattccaatcaatagaaaaagatggaatcctccctaactcattttatgaggccagcatcatcctgataccaaagcctggcagagaaacaacaaaaaaagagaattttagaccaatatccctgatgaacattgatgcaaaaatcctcaataaaatactggcaaaccaaatccagcagcacatcaaaaagcttatccaccatgatcaagtgggcttcatctctgggatgcaaggctggttcaacatacgaaaatcaataaacgtaatccagcatataaacagaaccaaagacaaaaaccacatgattatctcaatagatgcagaaaaggcctttgacaaaattcaacaacacttcatgctaaaaactctcaataaattaggtattgatgggacgtatctcaaaataataagagctatttatgacaaacccacagccaatatcatactgaatgggcaaaaactggaagcattccctttgaaaactggcacaagacagggatgccctctctcaccactcctattcaacatagtgttggaagttctggccagggcaatcaggcaggagaaagaaataaagggtattcaattaggaaaagaggaagtcaaattgtccctgttcgcagacgacatgattgtatatctagaaaacaccattgtctcagcccaaaatctccttatgctgataagcaacttcagcaaagtctcaggatacaaaatcaatgtgcaaaaatcacaagcattcttatacaccaacaacagacaaacagagagccaaatcatgagtgaactcccattcacaattgcttcaaagagaataaaatacctaggaatccaacttacaagggatatgaaggacctcttcaaggagaactacaaaccactgctcaatgaaataaaaggggatacaaacaaatggaagaacattccatgctcatgggtaggaagaatcaatattgtgaaaatggccatactgcccaaggtattttatagattcaatgccatccccatcatgctaccaatgactttctttacagaattctaaaaaactattttaaagttcatttggaaccaaaaaagagcccgcattgccaagtcaatcctaagccaaaagaacaaagctggaggcatcacgctacctgacttcaaactatactacacggctacagtaaccaaaacagcatggtactggtaccaaaacagagatatagaccaatggaacagaacagagccctcagaagtaataccacacatctacaaccatctgatctttgacaaacctgacaaaaacaagaaatggggaaaggattccctattgaataaatggtgctgggaaaactggctagccatatgtagaaagctgaaactggatcccttccttacaccttatacaaaaattaattcaagatggattaaagacttaaatgttagacctaaaaccataaaaaccctagaagaaaacctaggcaataccattcaggacataggcatgggcaagaacttcatgtctaaaacaccaaaagcaatggcaacaaaagccaaaattgacaaatgggatctaatgaaactaaagagcttccgcacagcaaaagaaactaccatcccagtgaacaggcgagctacaaattgggagaaaatgtttgcaatctattcatctgacaaagggctaatatccagaatctacgaagaactcaaacaaacttacaagaaaaaaagaccccatcaaaaagtgggtgaaggatataaacagacacttctcaaaagaagacatttatgcagccaacagatacatgaaaaaatgctcatcatcactggccatcagagaaatgcaaatcaaaaccacagtgagataccatctcacaccagttagaatggcgatcattaaaaagtcaggaaacaacaggtgctggagaggatgtggagaaataggaacgcttttacactgttggtgggactgtaaactagttcaacaattgtggaagacagtgtggcgattcctcaaggatctagaactagaaataccatttgacccagccatcccattactgggtatgtacccaaaggattataaatcatgctgctataaagacacatgcacacgtatgtttattgcggcactattcacaatagcaaagacttggaaccaacccaaatgtccatcaatgatagactggattaagaaaatgtggcacatatacaccatggaatactatgcagccataaaaaggatctgttcatgtcctttgtagggacatggatgaagctggaaaccatcattctcaaaaactatcacaaggacaaaaaaccaaacaccgcatgttctcactcgtaggtgggaattgaacaataagaacacttggacacaggtaggggaacatcacacaccggggcctgtcatggggtgggtggacaggggagggatagcattaggagatatacctaatgtaaatgacgagttaatgggtgcagcacaccaacatggcacatgtatacatatgtaacaaacctgcacgttgtgcacatgtaccctagaacttacagtataataaaaaaaaagaaattgcaaaattacacattctttgtaagcacacaaaggaaacatgttagaattttccattttaagctacaaataagctacaaataaagtagtctcaaatttcagataatataaaacatgttttctggtcacaatacaattaaagttgatataaataagaaagataactataaaatcttcctatgttagaatcaagaactatacttttaaacccatgtgtcaaataagaaatcataaattagaaaatattttaaactgaatgataacaaggcatgacatattaaaatgtgggaatcagctaaagcaatatttagaaagaaatgtatagcgttaaaaacatatattggaagagaagaaagcctgacaattaatgagctaaggtatgtctcaagaagctagtgaaacagcaaaataaaccaaaaggaagtagaagcaaggaaataataaagatatgaagtaaatgaagtaaaaaagaaacatacaatagagagaataaagaaaaccaaaagttggttccttgaaaattgacaaacttctggcaagagcaatcaagatgaaaagaaggcacaaataatatcagaaactttaaaaaactggacatcaataaagatcccacaaaaatttctgccaatataaaaatataaaaaatgaggatacttattaatattaaatgttctttcttgttgtatttaccagggattaatccattttacctaattttccaaacttagtgttaaaaggttattaatttaaaaaatccagatccagatggctacactaactatattctaccaatttttcaaaggagaaataatattaaccttgcaaaaattctttcagaaaatggaaaaagatggaatgttattcaattatcttatgataatagcataaccttgacaaccaaaccgaacaagaacaatattagaaaggaagataataggcccgttttattcataaacataaatcccaaacaaaatattagcaatatggatccaaattggatttatgctaggaatgcaagtttggcttatacattagaaaactgatataatttatcacagtgacagactgaaggattatacatattggctgtcctaagcagtgcaataagatgagaaaaagaaggaaaatatgtaaggattgaatatgatgaaacaaactcattgtatgtggaagatatgatggcatagatagaaaatccaaaggaatttatatataaattattagaatttttaaaatttttcaagcttgctgaaaacaaaataaataccaaaattaattgtatttctgtatacctgaaacagttggaaaaatagttttaaatagcatttaaaaattccaagcaggagttgcacattcctgtcagataatggcagctgcctaaatctctccacagtcttcaaaaaccatacatacacatacacacacaattttaaattatgactaaaaccacccataacccatctatagaataaccagaagacaaaaagtactataagtttatatttacaagtagaaaataaatatataaatctagccaaccttgctccagagagaaaccctgtctcaaaaaaaaaaaaaaaaaaaaaaagaagaaagcaaatgttggaaattaactgtcctataaaaacaaaagtgaattactaaatcacaagacccacaaacctctttggtcacatctattaaataaattacacttccatttatcaacagtagagggtactcctggctaagaaacctagtaagccacccagccctcatgtctgcctgcataaatcacctcttattgctgaaacaagaaaatgtaaggaatttctaaatgaacagaaaatagcatatgaagcagatggtattaatgttcttgagtttttattccctctttccttgaaaacctcatcaactttaggcatggccgtacggctcatcttgatcaatagaatgtgattggacatgacatatataccacttccaaatagaagctttaaatgtgattttgtgtttgacacactcttttgtgcctctgctccaggctccagactttaagcctctagaacgataagtgaataaatttcttttgttttaaaggcaccaagtgtgtggtgaatttgttacagtagccctagaaatctaatactaacaaaaagaatgttagagttgaattagaagtgtcagtgagaacttaggaatttaaaaaatcatattcttagcactgttcactgagggaatctagaagtaattacactgcagtaataacgagcccatcccatgcccaaatcttggtctctaactaccattttccagtcaaaagaatctgagctccctagagaaatgactttttcaaggctggatcaaggaaactgccaggcaatcttagatgatcttggtgatcttgatgtgccagaagattaatgggatcatgtgaaaagaacacagaaactggtctgaagggcttcctgttggccagatttgagacaatttgagcatcaaaaggaataatgagggtaatggatcataactggaaaatcagtttgcaaccatcaatgtacttactattgaatacttgtaaagaactttaagggttgctaataccattggataaaagcttgttgtgaaacagaatatttgcatggtctcaaagtctcactccacagattgttaggaaagggaaagggttacctttataaatatagagattaggtggacatcttaaccaagtgatcaaacttagcatcatcaataatgggacaatctggcatcgcatgccccctgatttaatgcagtaaggattaagtctaacaaaagatgtacaaagcctccaaatacagcgtaaacatttgtaaaataatctcagaacagggaccttaatgtttctcaaaaatttttccaaatacagaactttatttctatagatgtttatggtatatttgccatgctatatacattatgctatatattctatgtgctgaagatacaacaatgaccaaggtctttgcccttgtggaactgacatttggtggcggagacagaggaaacagtcaataagcatgtaaagagataaaggaaaagatactgaatgctacaaaggaaacaaataagttgagatttagaacaaaaaagagtcctattttacaagaggaataatgaggaagacctttctaaagaggtagctcagcactttgggaggccgaggcgggtggatcacgaggtcaggagatcaagaccatcctggctaacacagtgaaaccccatctctactaaaaatacaaaaaatgagccgggcatggtggcgggcacctgtagtcccagctacttgggaggctgaggcaggagaatggcgtgaacccgggaggcggagcttgcagtgagccgagatggtgccactgcactccagcctgggcgacagagcgagactccgtctcaaaaaaaaaaaaaaaaattgaggcagaatttcgctatgttgcctaggcttgtctcaaactcctgggctcaagcaatcctcctgcctcagcctgctgagtagctgggactccaggggcatgccactatgcttagtttaagaggtggtatttaaactgagacccgaagggtaaaaaacatggataaaagaagaaacagaaggggtaagagccttccaagcagagggaatcacatatacaaaggctctcatgttaaataaaacaagagttgacattgttgagaaactgaaagatcagctcatctgcgatgcggtaaaataggaggaatgcagtgggagaacagatcagagacttgggcaggggctatattaggcagaacttggagaccagagtaagggggccaaggtgggaacagaccgattaaattggcatctcttgggggggtgggggggtggggaacttacccatgcatcattttttaaaagctccaaaggcgattccaataagcagccagggttgggaacctagggggaaaatgtagctagatgaatgaagatggcccaaacgtcttttgttctgatagctaaactctctgtaggatcacagtgttacttcacagtgcatttgccaggaaaagtctcttcccatttggaatccgaagtaaaactgacaccacacttgaagatgccaggattgttagaggaaaatgtcacccaatagctccaggaagcaggagccctactgttgctgtttaaccacttctttcccattttggtggcaagttgcctccttttacacaaactgcctcaggagatcctaaagatatcatggtgtctgtctgtccttgcaagagcatgcattatggtaggacattgccttcattctgttcctttttctccaagactcttgcttattctcaccatttggctggactttctactgtaggattacctcggaatccacacaaaacccacagggtttcagagttgccttgaattacacgttttgaacattcagatcttcattttcccaaacatccacccagttataggtgacctttgctccaaagtcctggagtagcaaggtgccttgagtcttagactcttcccacttctttctctcttctgcatcccctcctgccaaggttgcccagccacactaaattgcatgccttgctgtgttgcattcgttatcattctaaagttgtcaccaacatgtgcgaaaccagtttatctaataacgatagctaccattttctgagctcttgccatgtactcctcttgccacagcaaatgcattgacaagggagtctgctggccaaagcctgactctcatctccagatggtccaacacagatgctgtgtgtgacccaggacaaagcacttaatgtcactgaggtttgggaagtgggtgagaacactgtagatataaggcctagctagagtgaaggcctccaaagcagggtgctcttaattctagatgtcccagatgcgtaggacagagtcatctagtcatcttccagggtttaatcctggactactggaaacaactagaagtgagaaaagcgtctgtgctttgcagtgaccattgtcctgtcagacaaccaataaatgctatctttcctctttcaggtttttcagggaaatcaagactccttcacacctgtggtgaactctctagacccaccgttactgactcgctaccttcgaattcacccccagagttgggtgcaccagattgccctgaggatggaggttctgggctgcgaggcacaggacctctactgagggtggccactgcagcacctgccactgccgtcacctctccctcctcagctccagggcagtgtccctccctggcttgccttctacctttgtgctaaatcctagcagacactgccttgaagcctcctgaattaactatcatcagtcctgcatttctttggtggggggccaggagggtgcatccaatttaacttaactcttacctattttctgcagctgctcccagattactccttccttccaatataactaggcaaaaagaagtgaggagaaacctgcatgaaagcattcttccctgaaaagttaggcctctcagagtcaccacttcctctgttgtagaaaaactatgtgatgaaactttgaaaaagatatttatgatgttaacatttcaggttaagcctcatacgtttaaaataaaactctcagttgtttattatcctgatcaagcatggaacaaagcatgtttcaggatcagatcaatacaatcttggagtcaaaaggcaaatcatttggacaatctgcaaaatggagagaatacaataactactacagtaaagtctgtttctgcttccttacacatagatataattatgttatttagtcattatgaggggcacattcttatctccaaaactagcattcttaaactgagaattatagatggggttcaagaatccctaagtcccctgaaattatataaggcattctgtataaatgcaaatgtgcatttttctgacgagtgtccatagatataaagccatttggtcttaattctgaccaataaaaaaataagtcaggaggatgcaattgttgaaagctttgaaataaaataacaatgtcttcttgaaatttgtgatggccaagaaagaaaatgatgatgacattaggcttctaaaggacatacatttaatatttctgtggaaatatgaggaaaatccatggttatctgagataggagatacaaactttgtaattctaataatgcactcagtttactctctccctctactaatttcctgctgaaaataacacaacaaaaatgtaacaggggaaattatataccgtgactgaaaactagagtcctacttacatagttgaaatatcaaggaggtcagaagaaaattggactggtgaaaacagaaaaaacactccagtctgccatatcaccacacaataggatcccccttcttgccctccacccccataagattgtgaagggtttactgctccttccatctgcctgaccccttcactatgactacacagaatctcctgatagtaaagggggctggagacaaggataagttatagagcagttggaggaagcatccaaagattgcaacccagggcaaatggaaaacaggagatcctaatatgaaagaaaaatggatcccaatctgagaaaaggcaaaagaatggctacttttttctatgctggagtattttctaataatcctgcttgacccttatctgacctctttggaaactataacatagctgtcacagtatagtcacaatccacaaatgatgcaggtgcaaatggtttatagccctgtgaagttcttaaagtttagaggctaacttacagaaatgaataagttgttttgttttatagcccggtagaggagttaaccccaaaggtgatatggttttatttcctgttatgtttaacttgataatcttattttggcattcttttcccattgactatatacatctctatttctcaaatgttcatggaactagctcttttattttcctgctggtttcttcagtaatgagttaaataaaacattgacacatacaaacaaatgcctttgagaattgtgtttttacactggaaataaaaatgtgaacactgatttttaaaacaaataggggcactgaatagcaagatggacactctagaaaaccaaattagtgagttagaaaaccagattaaattgaactcagagtaaaaatgatataattcatgagagtctgaataaaataaatcagaaatggagcctcaatccaggagaacagcttatatggagagagagagactgagagagaaatgggagtttctgttcaatgggcataaagtttcagctatgctgctgggcacagtggctcatgcctgtaatcctggcactttgggaggccaaggcgggcggatcacctgaggtcgggagttcaagaccagcctagccaacatggcgaaatcccgtcgctaataaaaatataaaaattagttgggcatggtggcacatgcctgtagtcccagctacttgggaggttgaggcacaagaatcgcttgaacccgggaggcgggtggaggttgcagtgagccaagatcgtgccgttgcattccatcagcctgggcaacagagtgagactccatctcaaaaaaaaaaaagtttcagttatgcaagatgaattaagttctacagatctaatgtacaacattgtgcatatagctaacgataccatactgggcacttaaaaatttgttaagagagcagataccacgttgtgttcttactacagttttacaacaatgcaaaaatgcattgtaaacactatgtgcaaatagaatagcaaagaatgtatacagtgcccatgagcataacattctagtggacccacaatgcatcagagttcagtgagactcaaagggagaagaatgttggcaaagtcagtggggaggagaaaatgagtgtgatgaaataggcggtctcattaaacttcccttacaaaacacaagatcaaagataaaattattaagaatttcgagacagtgacatcagagcaaacgaaacatagg

SEQ ID NO: 6 - DNA, 188930 bp, Artificial Sequence
  synthetic construct
tcaccatggctacattctgatgtaaagagatatatcctatacctgggccaaatgtaaacagcctggaaaagtgttaggttaaaaacaaaacaaaataaataaatgaataaatgccaggtggttatgagtgctattgagaaaaatgaagccaagagggatatcagtgatgcaggtgggggtaaagagcttacaacataaatgtggtgttccatatttaaacctcattcaacagggaagattggagctgaaatgtgaaggagttgtgggagtggaactacgtggaaatctgggggaaaggtgttttgggtaaaagaaatagcaagtgttgaggtccaggggcatgagtgtgcttgatattttagggaagagtaaggagaccagtataaccagagtgagatgagactacagaggtcaggagaaagggcatgcagaccatgtgggatgctctaggacctaggccatggtaaagatgtagggttttaccctgatggaggtcagaagccattggaggattctgagaagaggagtgacaggactcgctttatagttttaaattataactataaattatagtttttaaaacaatagttgcctaacctcatgttatatgtaaaactacagttttaaaaactataaattcctcatactggcagcagtgtgaggggcaagggcaaaagcagagagactaacaggttgctggttactcttgctagtgcaagtgaattctagaatcttcgacaacatccagaacttctcttgctgctgccactcaggaagagggttggagtaggctaggaataggagcacaaattaaagctcctgttcactttgacttctccatccctctcctcctttccttaaaggttctgattaaagcagacttatgcccctactgctctcagaagtgaatgggttaagtttagcagcctcccttttgctacttcagttcttcctgtggctgcttcccactgataaaaaggaagcaatcctatcggttactgcttagtgctgagcacatccagtgggtaaagttccttaaaatgctctgcaaagaaattgggacttttcattaaatcagaaattttacttttttcccctcctgggagctaaagatattttagagaagaattaaccttttgcttctccagttgaacatttgtagcaataagtcatgcaaatagagctctccacctgcttctttctgtgccttttgcgattctgctttagtgccaccagaagatactacctgggtgcagtggaactgtcatgggactatatgcaaagtgatctcggtgagctgcctgtggacgcaaggtaaaggcatgtcctgtagggtctgatcggggccaggattgtggggatgtaagtctgcttggaggaaggtgcagacatcgggttaggatggttgtgatgctacctgggccccaaagaaacatttctgggtaaggtgtgcacacatctgtgttattagcagaaatgctaactgccaattcttttcataggtctgacctatttgttgatattttgttctgttttgtccattgcttctcttcgtcatatgctgctcctccagaatctagagactggagtagagggagggtgaagggacaaagacaaaacttccctctgcctgcccaagcttccatagagagaatcaaggcaatgaaatccaatcaatatcacacacaagtttcatgtctggttctcttgtgtgtacatgcaatgtgtgtttttataatatcttttcctactttgggtgtaaggataatatgagccttgagttcagaagcttttcgtgttttgggggttctggtgcatttaggcagagtattaaataactttatcaatattgtctatggtcatcagttgattcagatttttctacctcttcttcagtaaatattggtatattttggtctatactttcatagaaagcaatctactgtccctagatttgataatgtattggtatcaagttatgtaagagtctcctgtgattttgttaaactgttctgtgtctgtagttatattttctttttcattccttatgttgtatatgttctcttcctctcttttaaaaataatatttccaggagttttcttgattttattggtcttgtcaagaattttcttttggtttgatttatcaatctcttttttctttctgttgcatcagtttctgcttctactttcattgatttattccttccttctaatttcctttggttcattttgttgttagatttttgcttcttgagttgaatgctgaaatcatttattttatttttttgtcttctttaaatgtgtattataaagatttaaatataatacatagattgtggctgtgtaaacattaaatgtggtcatgttgtacatactttatattctttttggttctttctgtttggctccccaccctctttccacatcagtccccttctcccccacctcagctaggtaaccccagtatgataatatatattcacatacacatacacacacacaaaggttttcttggacattatttgttttataaaattgggacattatacacacatttctcactcattaacacgtactagaactctaagtcaattggtatagctttaattcattatttttattggctatataagattctatggtatggctgtatcacaatttagtcaatatgttcactttattccagtttttggctactatatcctatatcattacatactggtgcttttacttctgttgaacaaacttgcaagaggaatattaatggaacgaagggaatgtttccttctaagttttaatttccaaagaggtcagaacttttcaaacatttctaccatcgaagtatgaaaatggccttctctctgcattcacatagcgataagttttatcctgtttttaaaatttgccaattttacaggtgtagagtgatattgcatcattactttcattgtgttatttttatttctaataagttgagcatctttttaaatgcttgttggctattggatttatttgggggatttaattagtcatatgatttgcccattattctttggactctttcatttaaaaaaattatgagaacccttttattattacaaatattaactctttgtcatgtatattgcagttttccccaagatctattgtttgtctgttgactttcttataacttttaccaaaacagtttttaatttttataatcagagatatcttttctttcatatcttcagagtcggcaaggttggttaaaaatgtttcccacacctcaagattgtacgtgtaatctcccagattttcttgcaagatgtttactgtttcgctttttatatgcattgcttcaattatctgctaattacttttgtcatatggcatgagagagggatttgtctagttttatttccatccagatcaatagcctattgtgatggcaccttttgccactgatttgaatcaacacattcatcatataaagttctcatatatattagcatatatttctggattcattaggctgtttcactaatctactattatcttgctatgccagtaccatagtgatttgattacagtgagcctatgatatcttctgatatctggtgggtgaaagcaatcctcactattctttttgtacctttcttagctattcttagacactttattcttccacataaaactgttaagatatttttcaaattaaaaagatccaagccctgttgtgattctaactgcaatttcattaaactcagaccttaattttattaatgtaataaatttaaatatttttcttattacatttatctctgtgtattttataagtgtgatgctattgttaataagatagttttctcctatttccatttatgagtgcttagtaccaaatagagataagctattggtttgtgtattttcagctttttcttttgagcctgggtctcattttgtcacccaggctggagtgcagtggggtgatctcaccttactgcagcctcaacctcctggattcaagcaattctcctgtatatcagccccccaagtagctgggactacaggagcaggccaccatgcccggaaaatttttgtatattttttagagatgggtttttgccatgttacccaggctggttttcaactcctgagctcaagcattccccccacctcagcctcccaaagagctaggattacaggtttgagccaccgcacccagccattgtatattcatcttaaatctagctaccttaccaaatttgcctattaattctagtaattttaccctaaagtctctgtgagtattgaatcatatcataagttaaatgagacagattttagctcatttccaatatttatagccagttatttcattttcttatcttattgaatttattagaaaacaagagcaaatgttaaataataacaatgaaagtgaacattccttctactctatgattttacttgaaataatttttgtattttgctatttagagtaacatttgctgttttggtttttgtaaatggtgtttattctattctcatttgccacaaaatgtttatcataaataagttttcagcagctggtatcatctgaattgtcttctttgatatgctgatgaacaaattatgttcatagatgtcctgacactaaatacccttacattcttggagtaaaatctactattcatggaatttgatcattagtgggttctatgtactatttctttagactattcttagtagattttcactactcaacctactaataataataaacaaagttttgttggctttatcaaatgaattgatgagtactccatctttttctattgcttagaatagcttaagtaacatttgaattatccattgtctaaaagttaggtgagactcacttatgaatccatttggtcctagtggcatttgcaatatctttaatcacccctccaggctcttctatgataatcagtcaattcaagtttcaacttccaataattatatacctttctaggaagtaactttatttattttttcaattttgttgccacagtgttgcatgtagcactcactcatgattcttttactccacattatctgtagttatgtgccctttcttattcctaaattcctctatctttgctatttatctttttttccttgaataagcttgccaatgacttgtctattttgttgctggtggtgctcttttcaaagaatgggcttttggattttttttttttctagttggtataaagcatttttattttcactgagcagaaaaagaagctattgattcattaactgtgctgctttattggcatgtagctatgcactgttcacacattaatatataaaactcgtcagtctgttttattttgtctgatgggaaaacatgaacagtgagatttcttatgcaaaaagtgaacagttcaactatgctagctccatatacctttattaacattccagagacttatcctctcaacatgatctgatttctgtaggataacttttcaggaaaagtattttctgatcagtgaagcttggagatataaataagcaatcggccaggtatggtggttcatgcctgtaatcccagcactttgggaggccgaggcaggcagatcacctgaggtcaggagtttgacaccagcctagccaacatggcaaaactccgtgtctaccaaaaaaaaaaaaaaaattagctgggcatggtggtgctcacctgtaatcccagctactgaggaggctgaggcaggagaattgcttgaacctaggaggcggaggtggcagtgagctaagattgtgctcagcctaggtgacagagtgagactccatttcaaaaaataaaaaaataaaaaaaagcagtatctctcatattcattaactggaccctgactttcttaaagctcaccccaaagctgaagtccatgaaggcactagttctcaaacttcagtgtgcataagaatcactcgggaagcttattaaaatttacattcctaggccccatcctcagcaaactatttagtccccaggtaattctatcccaccccaccccagctttattgtggtataattgacaaataaaagttgtatatatttaaggtgtacaagataatgttttgatgtaagtatacattgtaaaatggtatagcatgaagggttttcttttcatttttttcagaatagtttgtaatatcttctttgatttcatctttgataatctagacgtatgattttaattgctttttaaatttgtttatcaagttagtttgtagtatttgggtcaacattgaatatcctgttaatttcctattgctgtgtaacaaactacatcaaatgtatcagcttatgacagacccatttactgtctcacagtttctgtgagttagaagtccaggtggactcagctggatactctgtgcagggtcatacaaggccaacaccaaggttttaatagggctgcactccttagtgaaagctcttggggagaatctgcttacaggctcatttggaatgttagcaaattcagttccttctctcactttccatgtagtgccctctaccagcaatggtgcatcaacactctctcatgcttggaattgctctgacttcaattttccgtgcatatctctggccttttttgcctctctcttttacttttaaggactcatgtgattacattgggccgacctgggtaattcagaatactctccccatctcaaggtcagctaatcagccccttaattccatctgcaaagtttaatttgccacataatatatttttggacatgacaccaaggagcaaaggtgatgtgggccaaatttttacctgccacaggtatagtttacatacaatgaagctcatcaattttaaatatgcagtttgatgagttttgacaaatgcatacacttgcataaccaccaccctaatcaacatgcatttacatcaaccctcctgcaactttttaatgagtctctcccactgacctggcctcagccaataaactgctatctggaagttacagatttgttttcacatgttctagaattttacatcagtggaatcatacggtatgtattcttctatggctttttttcttcagcatcatgatttggaaattcatgcaggttgttgtataaagtatttctatcctttttattgctgattactgctccattatgggattatatcataattttggattatttccagttaggagcaaatacaaataaacctgctatgaacagtgctccacatgttttgtgtgaacatctattttcatttatcttagttaaatatctaggagtggaattgctggatcatatggtaagtgcatgtttaagagaaactgccagacagatttcttgaacgtaccattctatactcccaccagcaatgcatgagagttccagttgcaatatatcctggacaacatttgatgttgccagtacttaatgactgcacagtggtatctcactatacttttttttttttttgagatggaatctcatcccatcacacaggctggagtgcagtggcgcaatctcagctcaacatctgcctcctaggctcaagcaattctcatgcctcagcctcctgagtagctaggactatggtcacacgccaccgtgcccagctaatttttgtatttttggtagagacggggttttgccatgttggccaggctggtctcaaactcctggcctcaagtgatccacccgcctcggcctcccaaaatgttgggattacggcttgagccactgcacctggttatacttttaatttgcgtgtctctgatgactaaagatgttgagcatctttgcatgtgctaattagccattcctatatcttcttggaagtgtctattcaaatcattggtcctttgtttttaaacgtagtttcaacttttattttagactgaggaggtacatgtgcaggtttgttacatgagtatgttgcatggtgctgaagtttgggttacgaatgaatgatcctgtcactgaagtagtgaacatagtacccaataggtggtttttcactccttgctacccttcctcctccctctttcctctagtcgtctccagtgtctattattctatgtccatgtgttctcatcatttagctcccacttctaagtgagaacatatggtatttggttttcagttcctgtgttaattcacttaggataatggtttgccagtttttaattgggttgtttgtcttgttattgttgagttttgataattttttatatattctgggtacaagactattcagaggtacctgttttgaatgtttttttccaatctatggcttgcattttcattttccaaatggtgtctttcaaatagtggaaatttatagttgtagttaagtccaatttagcttttcttcttctatgattcatgcttttttttcccctgtcctaggaaatctttgcccacctcaagttcacaaagcctttcttctgttttcttctagaacttttatcattttagcattagtatttaggtttataatacattttgagttaaattttctgtatggtgtgacttttctttctctattgaattcccttggtgcctttgtagaaaattaaatgactgtatataggcaaatctgtttatggattctctagttccatagatgtgtatatctgtgcttatgccagtaccagattgttttgattgttgtaactttatagtaagtcttaatatcaggcagtctaaaacctccaacttacttttttattgaaattgcttttgatatatttaggcttttatatttctgtattaattttatagtcaactagccaactccaccaaatagccaactgggattttgactggaattgaattgaatctgtagatcaatttggggagaattgacatttaaacaatactgaatctttcaatacaacaacatggtatggctttgtttctttaaattttctttaatttccctctaggatattttgtagcctacagagtagttcttgcaagaattatattaattgtatccccaagtattttgagggattcgatgctattgttaattgtatcatttttatttgttttcgttttccaatcatttgttactaaaatatagaaattcaattgatttttgtatattgaccttgttcactctaatcttgttaatttgcattttagctctagtagcgttttgcacttcttttagaatttctacatatacaataatgttgtctgcaaataaagacagtttgcttcttcctttccaaactggatgctttttattttttttttcatgccttactgtactggcaagggcctccagtacaatgttagatagaactgatgatagcagaatccttgtcttcttcctgatttcagagggaaaatattcattattttaccattaagtacaattacttgtaaattttttcatagatgccctttgtcaaattgaggaagtttccttctattcttggtgtgagagtttttatcaagatttgatattagattttgtcaaatgctttttctgcatctattcaaatggtcatatggtttatcttgtttattctgttatggtgaattaccttgattgattttttaatgaggaactagctatgtattcccagggaaaaaatccacctggttgtgacatattacattggtaatattttcgctatggactgaattgtctccacctccccccaccccaaattcatatgttgaagtcctaactctcaagatgattatatttggagatagggcttttaggaggtaaacaaggttaaatgaggccataaggatggagtcctaatctgataggactggtggcctcataagaagagagaaggttctctctctacactcatgcactgaggaaaagccatgtgaacatacagcgagaaggcagccatctaccagctgggaagagggctccactagaaactgaccgtgctggcaccctgatattggatttccagcctccggaactgtgagaaaataagtttctgttgtttaagtcacccaatctctagtattttgttatggcagccctggccaactaaaactgttttgttaagggttttggtggtgatggtggttttttagtttttgcgtctgtgttcatgatggatatttggctgtgattttcttataatgtcattgtctggttttgatataagagtggtattagtccgttctaatgctgctatgaggacatacccgagactgggtaatttataaaggaaagagatttaatggactcacagttccacatggctggggaggcctcacaatcatggtggaaggcaaaggaggagcaaagacacatcttatatggcatggtggcagacaagagagcattgtacaggagaactgccctttataaaaccatcagccctcatgagacttattcactataatgtgaacagcatgggaaaaccccactgccatgattcaattacctcccacctggtccctctcacagcacatggggattgtgggagctacaattcaagatgagatttaggtggggacacagccaaaccatatcaaagagtaagactattctttttttttttttttttttttttgagacggagtctcgctctgtcacccaggctggagtgcagtggtgcgatctcggctcactgcaagctccgcctcccgggttcacgccattctcctgcctcagcctcccgagtagctgggacgacaggcgcccgccaccacgcctggctaattttttatactgatagtagagacggggtttcaccgtgttagccaggatagtctcgatctcctgacctcatgatccgcccacctcggcctcccaaagtgctgggattacaagcgtgagccaccgcgcccggctgactattcttataaaatgagttgagacgtgttcactcttctatttaatgaaagagtttgtgtagaattggtatcatttcttttttaaatgtttattcaccagggaaatcatcttatcccagtgttttttgttttggtttggttttttttttaagggtcttaattgtgaattctatttttaataggtaaagggctatttgaattttctatttcttataggataaattttaataatttcttttaagaaattccatttgagactgggcatggtggctcacacctgtaaccccaacactttgggaggaggcagcaggattgctctaggccaggagtttgagatcagcctgggcaacataacaagacttgacttctacagaattttttttcattagccaagtgtggtaacatatgcctgtagtcccagctacttggaaggctgaggcaggaggatcacttgagcccaagagttcaaggctgcaattaactatggatcatgctactgcactccagcctgagcaacaaagcaaggctctgtctcaaaaaaagaaaagaaattccatctgagctgttgaatttaatagtataaagttcagaatatttccttaccattttttcactccttggaggtatgatttacatactgtaaaaatcacttattttcagtgtggagattcttttcctttcctaaatctccacatttttattgacatatactttacatatcataaaattcaccatttgaaagtgtacaattcagtggtttttagtgaatccgtaaagtgtacaactatcatctttatttaattccagaatattttcatcacctcaaaaagaaaccctgtaatcattaaacagtcacttctaattttcttcctttccccagcccctggcaaccattaacctactttccgtcactgtggttttgcctattctggatatttcatgtaaatgaagggataaaatatgtggccttttgtgtctagcatcttttgcttagcatgttttcaagattcttccatttttgcagaatgatagaggagttaaaataagaaaataaagatatagtaagaatgaaactattttcattttttaatttaaaaaaatcttccatgttgtagtatgtatcagaatttaactcctttttatggctgaataatactccattgtatggatagaccacattttgtttatccattcatctgttgatggacttttggattgtttccccttttggctattatgaataatgctgctatagaacattcatgtacaagtctttgtgtacatatgcttttatttctcttcggaatatacttaggaatataattgctaggtcacatggtaattctatgtttaacttttagaggaactgccagactttttcaaagcagctgcaccattttacattttcactaccaaagtatgagtgttccaatttttccatattcttatcaacacttgttactgtctgtctttttaattatactcatcctagtgtggataaagtgatatctcattgtagtttggatttgcatttccctgatgacttacgttgttgagagtcttttcatgtgtttattgaccatttgtgtatctcctttggagaaatgtctatttaaatgctttgcgtgtttttaattggattatttgttttttagtactgagttgtataagttctttatttattcttaatattatacccttatcagagctatgacatgaaaatattttttcccattctgtgggtagtattttcactttcctaatagtatcctgtgatgcacaaagtttttcattttgatgaaatccaatatttatttattttacccctttggttgcttgtatttttgttgtcatatctaagaaatcaatgtcaaatcaaagatcactaagatttaaacctatattttcttttgagacttttatagttttagttcttacattgaggtcattgatccacttggagttaattttggtatatggtgtgaggaggggatccaagttcgttctacagcctatatagcctgcagatgagcaatgttagtgaccttgaaagtagaggcccaggttgtcagtagcctggcatctaactaaacaaccatttatccattaaagttagccctgttaacaattaatattgagataattttacttaatacactgtgtatattagtgtccatctagcatgcagcctgaggcacagagaataatagtttgagtataaaattgaattgaatggaatacatcattaatttattatctagctttctgttattgtataggcagtcacatgtatttaccagaaaaaagttgatagaatttttattttaatgaaacccttttatactttagattattttgatgctgattaacaggataagctgactctggacacatcctgacagcctctgccaaggtttgaaataaacagctgggaaaattcagttttatattatctgttcccgcagctgctcagtttcttctaaccacaggtcagggaatataataggttttccgattagttttagataaaatgtgaaagaacagttcatgtcaaggacaatggttgccaaatatatttggcaggatttctatattgaatcccaaaggaaatacacaaacaaaaccccacaaaagttaggaaggagtaaaacccaggaaccctggaacattttgtcatttactatgcagatttgcctgaaagtgagacaggcaaataaatcacatgtttctgccagcgtggaaaatattcactcaaatggcaaaggtctcaggctggggagctggatattgtcctgtaataggttcatctcagaactgaatcacacacttggagggtgttaatgctcttaggaacatctagttattccctttgaatagagtcctgtcctgaatcacatatacttgacctagggcctaggcctttttgtttttctgtctcacaatcttgtttctccatcaattatgtgttttcactcttccctcagagagggaaaaagtgtttctgtgtgctcttgatcctgttccctctctgatcttccaatctattgctctataacatattttatatgtgtcttatatcttcattttagtcagaaacatttatttatttatttatttatttattttttgagacagagtctaactctatcccccaggctggagtgcagtggcatgatctcggctcactgcaacctctgcctcccgtgttcaagcgattctcctgcctcagcctcctgagtagctggcattacaggcatgccccaccacgcccagctaatttttgtatttttagtagacagggtttcttcatgttggcccggctggtgtcgaactcctgacctcaggtgatcctcccgcctcggcctcccaaagtgctgggattacagatgtgagccattgggtctggcctttaatcagaaacatttaaagtgaaagcactgtggtaacttatgttgaaataccttagaaatcaatggaaactgcacagagagggggtaggatagacgtagtggaaccaaggatatgatatggaaaaaggagaaaggtagcaaactagggatgagttggtgaatgtggaagggcataataatgttaaatgactgaaaactacataggcttatgttaagactagtgccatggaaatttttagaggtagatgacattagagtatgtttaaatataaattaatgttcttgcagtgagccgagattgcgccactgcagtccgcagtccggcctgggcgacagagcgagactccgtctcaaaaaaaaaaaaaaaaaaattaatgttactggttgtgttccctagatgtagactctgagatgaagattaacatgcaggaattttatttggagtgttcttgggatcaacacctgaggaatcagggataggcagagggagaagcgcgctgccgggtaggctccaggacagccttgctggatcttacagggagctctggagctggaatgaaccttccaggttggaccaacatgtccaggcctctgtgtccctgcactgagcactcatgaagtgctgtccatcctgggacagggcagagtcggcgctgggaagaggcgtggtctgcccagagagggggtggggcctgtcctggaaatgggcggggcatgccctggtagaggggcgtggtctgtcttgggaaggaaggtgcgtggcccccacaggcaacattcctctggggcaatcccggcgcacacctcagcggaggtgaaggctgacttcccacacccaatggctgggactggggagttctttcctagactgccatccgggcgcccctcaccctcttgctgctcagctccaggtcgtcgtgggttcagggctcagctgcacgctcctgcccgcgccctgggcgtgatggcacccccagcccctgccattcttccccctcaccccctctccctgccactgctctgcattgccctgggttagcctggcggggccaggtggcacccgccgtatactcttgcctttctgctgcaggggcctttctgctgcgggtcccagagctgcagggaggggcggcagagactccccacgtggctcattggcgggggtgctaatcagagttcttttgctgccactctttgattcccaaaccccatgtaatcttcttagtggggacacagaatcatctttgaattcatacatatacagcaccttggaggctggccctccatcctcacagagacctgcctccaagctggagttctacctgtgcctggttgtggacccactccctcatctcttttgctgtacaatgattccccaggtctacacggtgctatatggaattccacatcagtgaatcaaatcctctgtaagatttcagatagtggtgctggctaaggccctgaagggaggaaaggctaagttacgccaagattaggtatcacaatgaagtcctgtcctttctaggatggaaggagttcagtgtgtctggccaccgagaagctggtttgtctctgtgatggacaataccatattgcagcaatccccaacctttttggcaccagggactggtttcgtggaagataatttttccagagactttggggttgttgggaatggttacggcatgaaactgtccgcctcagatcatgcggcattagttaggttctcataaggagcacaaaacctagatcccttgcatatgcagttcacagtagcattcgcactcctatgagaatctaatgcagcagctgatctcacaggaggcagagcccaggcggtaatgcaagtgatggggagccgctgtaaatacagatgaagctttgctccctgcctgctgctcacttcctgctatgtgaccccattcctaacaggccacagaccagtactggtcaggggcccaggggttgggcccaatatggcatattgggagctcagcattgatttttgttgctggcaggttggactttggtggcaacagtagctagatcagccttagtcagtgggaagccacgcttttgggtccatgcattaattctctccctgctgctgtagccacttagctcatgtcttgccagtactgcgatggcctatgcagaggctagctgatgtgaattgccagagtcatttttatatgtgttgttggtttgtgcttccttcaagatggatgctttctgttggcattaacgtattacttggagatttttctagtttgtgtccactcactaatatgcctttgtcccaacttttttctggaagagcttccttatcagtacgctgggccctggccctcagccagtacagaaagtcatttgtcaaggccttcagttggcagacgtgctccctggactacgtgctttctcgggtgtcccagaaaccctggaatggagtgaaatgcagggctacgtgggagagcagggaggcaagaattaagtcggccccacctttgcccaactcagtgggtctccttgagagaggtctgcagtttcaaggagacttttcagccaatctgctgcgagatcctgtgaaggggtgtgaaggtcttcctctgtgactatagattggccagtctctccttgtgtgtccaacagttttcattatactttatgtgaattaatgcaaaactgctaggtttaaactgctcaccattttagggatcccttctggattttaccttccttaaggggaaattttcctcctttcctcagttcatcctttctgccttggctttgacgtggtctggaggccacagagcctcctcctgagaacctctctctggtgtgtctgtttgtgtccgtccctctcctttcgatcattccctgtggttcctgttgggcgcggctcccataaacgcacagagcagggtctgctttgtctgcaacctgatgcattgttatttctcaccaaaacttgcagtccaaacatcacatttccgggccacactctttgtcagagctccaggggcacaaccccggggacctgctggaaggtgccaccgtgacgtgtgcctagatgcgttttccctcagttaccacagcgttcctctggttctggtggctggagggtgaccgcgtgcttcatgaagggggtccttactgcttcgcatccacccttttcacggaaagcactttgtcacatgttttcagtgtttctaagcgattttctgccaatcttgtgtgctaagattgtgtggcagcgtttccacagatttatagctggcaatgaattctcccaaaggaaatcagacaaaataaaatgtttccaacattgttcacatactgacaacttatgtgcttccttgggtgattttacaactttttaagcacatgaataaaaattattgtctgcttttttctccttttttctctcttttttttcttgcatgcagaaagtttataggagggggatcctctggatcaacacccatgggggagtgaaggaagcaggattgggtaaaagaagttgaggtgatacagtctgaataaaggtcagtcccacagggagctcaagctaggatggctctgcagagatgttctctattgaggcaagttgtctggacctatatagtcccacctttaccaggaataaggcatgagtttggatgtggtgactgacttcagccaaaattggttctcagagaggaattcagattagagttgtcagctgtcagcacacccagcagcttaggaaataagtgctttagtcctgaagcggtgaatctggacaccagcctccactgtggtccaccctttctgctgctcagattcatttgcttcataagttctggaatggttccttcaggattctgatgggctccctttcctggggaaacaaaagagaaaggtttggaacacagcacaactcctgctgctttagcttttcttgagtctgcaactggtactcatcatcttccccttctactacccattctagatccctccccccaccaccctctcaattcatacttctgctgctccaagtgggttaccagataaggtatctggtcatcatgccctttgtaagccatgactgtacttgtccatttatcatcaacattgaacaagggaatactaagagatacccaggcagatgacctggctgccaaatatattctcctctgtctccattgtgtaatgtcagcccttcctcctgatgatcaggatcggttacgcttgccaggatagtgactcttttccttacctcttggtctcttaatagtgatctgaagtaatatgatggcaaccatagtttcaagtttaatgagactcttggtgtgtccactggcggacatattccccttttaagaaccagtacttctaaactctcagagcccagagttgggataagaggcatagtttccctaattgggtcactgggagtaatggtagtgtgaggctgctcctacttacactccttgttttccaaaaccatatattttacttcgggacacaccccactaaacgatggccattgatctagagtatatactgcatcctgcaggatggtgcctcgtccttaggtattatgtctaagctagtgcctcagctgtgccttcaacaagctgtcctaccactctatcaagtgggtagcttctgggtagtggattccatggtcatgtatcttcttgctttaaagtaggtctcttggtctgatgcagtgttatgtaagatcaaatattctgtgaggccttgaatggtggtgtttactgaggctcaccaagcaactgaatgattttcttgagaaatggtgacatatcagagccttagctttggtctctgttactggcaagttgaacattaacaacatcagtagctagatctgtattgatgagtccatgatgttgggcccatgcatagcctctgccatggctcctcctttcatacatccattttgtaagaattggggcaccaacagcagagactggtaagcatcaaagtggctaagtcattcagtctacttggttgtttagtgctgtttctgtggctgatgttcttttcatttattcattctgtaatgcgtatcctttgtagattcaatttccttctctctgaacaacttctttggatatttattgaaaggcaggtctactgtcaataaattccttaatttttattgtctgagaaagtttttatttctccttcatttttgaaggatactttcacagagttcagaattttaggttgactgttttttctttctctcaacactttaaatatgtcagtgcactctcttcttgtttgcatggtttctgaggcgaagttggatgtaatttttatctttgctcctctatggataaagtgtttttccccatctggtttcttacaacattttttgtctttgattttctggagtttgaatataatatgcctaggtgtagggtttttttatttgtttgctcgtttgcatctatctttttttttttttttttttttttgagacagaatctcgccctgtcacccaggctggagtgcagtggcgcgaactcggctcactgcaagctccacctcttgggttcacgccattctcctgcctcagcctcctgaatagctgggactacaggcacccgccaccacagctggctaattttttttgtattttttagtaaagatggggtttcaccatgttagccaggatggtctcgatctcctgacctcgtgatctgcccgcctcggcctcccaaagtgctgggattacaggcgtgagccaccgcgcccagctgcatccatcttctttggtattctctgagcttcctgaatctgtggtatggtgtctggtgtctgacattaatttgggggaaattctcagtcattattgctttaaaaatttgctcctattcatttctgcattcttcttctggcatttccattatgtgtatgttacaacttttgtagttgttgttccacagtttttggacattctgggcccatgcatagcctctgccgttgttgttggtgtttttttttttttcagtctttttttctctttgcttttcagttttgattggaagtttctattgtcatgtcctcaagctcagagattctttcctcagccatgtctcatcaaccaatgagcccatcaaagacattcttcatctctgttacagtgttttgatctctagcatttcttttttattctgtcttagaatttccatatttttccttatgatatacatctgtcattgcatgttgtctactttttacattaaagccattagcatattaatcatagtttaaaaaattcctggtctgataattatgacattcctgccatatttgactctgattctgatgcttgcttgttcagtctcttcaaattttgtgggttttgccctttagtgtgccttgtaatttcttgttaaaaggtggacatgatgtactggctatgaggaactacagtaaataggcccatagtgatgtggtgagatggaaagaaagaaaagatgctcaacatcactaatcattagagaaatataaatcaaaactacaaagagatactgcctcacacccattaggatggctactatcaaaactaaaacagaaaataatgaatgttggtgaggatgtggagaaattggaacccttgtgcactattgcaaatgtacaatagggcagtttctctaaaaattaaacagaattaccatatgatccagcaactcgacttctggctatatatgcaaaagaactgaaatggggtcttaaagagatatttatacatcaattgtattagggttctccaatgaaacagatccgtgtgtgtgtgtgtgtgtgtgtgtgtgtgtgtgtaaatatatgccaatggtaaaagtacagggtctgagtcagaaggcagaaccaagaatgcttatgtccaagggcaggagaagacagatgtcccagttcaaacagggagagtgaatttgcccttcctctgtctttttgttctattcaggccctcagtggaatggataatgcccacccacattggtgagagtgatcttctttaccaattcacatgctattctcttctggaaacatcatcacagacatacctagaaatactgttttgccatgtatctgggcatctcttagcccagtcaagttgacatataaaattaaccatcatatccatgtttataagcagcattattcacaatagctaaaatgtggaagtactgcaagtgtctattgacagatgaatggataatctaaatgtggtatatacacacaaagcattacgaaagaaggaaattctgacacatgctacgacatagatgaaccttgagtatattacgctaagtgaaataagccagtcatgaaaagacaaatgctgtatgattccacttatattgggtacttagagtagtcaaaatgatacagaaagtagaatggtggatgccagagactggaggaggtgagagttattgtttaatgtttatacagtttcagtttacaacataaaattaattctggaggtagatgggagcatattacacgttttctttttggagatgggatctcactctgttgcccaggctggagtgcagttttgtgatcatagctcactgcagccttaactgtctgggctcaagtgatcctcccaccccaggcaccaaagcagctaagaccacaggtgcacaccaccacgcctggctaattattattatttgtagaggccaggtactgctgtgttgcccaggctggtgttgaacccctgggctcaagtgatcatcctgccctggcctcccaaagtactgggattacaggtgtgtgccaccacacctggccagaatatttaatgctactgaactgtatatttaaacatgcttgggctgggcatggtgcctcatgcctataatcccagcactttgggaagccaaggagggtggattgcttgagcccaggagtgtgacaccagcctgggcaacatggtgaaaccctgtctctacaaaaacattaaccgggcatggtggcacacgcctgtagtcccacctactctggcggctgaggcgggaggatcactcgaacccgggaggtggatctcgccactgcactccagcctgagcaacagagtgagaccctgtcaaaaaaaaaaaaaaaaaaaaaagatttacgatagtaaattttatgtgtattttaccacaattattaaaattgaagaaaatccccatgggtcactggtttaccaatttagccattttcaccatttttagattgcattttccttctctatctcagcattctgactaaaggaaaagcaaaatttcttacaagaatgaatgattctccagtgtggctgctcctgaaaggaacaatgagacttttgttatttcaccacaagactgagaaagaaataaacaagtgataaatgcccagaccccttcttattcattccacatcctggtaatctgaggcatggtgtggcttttactccaagcatatgaatacttacaatcagaagctgcctctcctttccctcactttatcattattgccatcatttatgacaatggagggagtgtctcactggatgatatttggggttctttcttcagtggtccgccataccaagcatttatttgtgctgttctccatctttcacatctaccacttttcaaaagtccctgagagtcaataagacatgcgactcgaacaactgcttcacatctaagtgtatgtctttaaaaatctctccttttccatgtttatgtctgatgtgttttgttatggcaaagtggcatgtagtatacggttcataagtgaatcgatgtatatctgtggagggcaaatgctcaattttagatctacacatgaaagcttttttccagggcaggagccttgctttctccaactaagccttaattacccaaatgcccatgtgttgtgcctttggcttgttgaaatgataccaactggtaaaatctgatgggagataaaagttagatgtccagaagcataaaagtcaggaagagaggctctttatggcatagagaaagctgcagaactgctccatggtgtgcaaaactcatcagcacatgaaactagtgagtggagatagtcaccttcaaccactttgtaatttctaccaattcacttggggccagtgtcccttattcaccaagattcacattggtccttttgattatttggcgtgaggaggcccccagacatgctaaactgtcatgcagggagagaggaaaagttgggaaccagcctttgcttaaaagggctttgacaatggaggcaaataataacattttgggaacatttatataagtaattatataatttctgattcagtagctggttcatgaataaatgagtaattgggagtatctgagtggagacaagaatgaacattaatgtaggactgattctgaattacagcttctggcactagtaggtttcaatatacatagtctgctgaaaggtaattttctctgtgatattcctggtatccctaaggagggaagtataattttaggtacatactgacaaaatttgaacacaaggtacttagatgaaagttatagtctgttttagagatgaaattgaaggatgcagtagctattgctttggcaaaggatttttggctgatgcagtgtatggttattgattttatgattcttatcatatggcacctaatgtatcagttgagttgtgaaaacagtgtttcggtttaatggatgttagggatttatatacaacttcaaatttgcctccttgctaatagtagaaaagagtagtatggaagcattacttccagctgctttttgaagtgtccaccaaaatgaacgactttttcctttcttcacgcagatttcctcctagagtgccaaaatcttttccattcaacacctcagtcgtgtacaaaaagactctgtttgtagaattcacggatcaccttttcaacatcgctaagccaaggccaccctggatgggtaatgaaaacaatgttgaatgctatttatgaaattgggtatcttattttctatcacagattccccaatcttgaggttgcagttaaaaagtgcagctgccaaagagaatgtttccctaactgctacctatagggaaatacactgactgcattttctgtctttttgctgggccgtcttcctctgcttggtctatgccaactgcttacctccacttagatgtcaaataaagtatgtaacaacatgttatgacaggacattttctgtcttagaattgttgctgagaattataggtgggaagtatccccttattctaaagagagatatcagcctatcgatttagaacttgttcaggtagtagtccaaaattggttctgcaacccttaggccctgactcacctccaaccttgtataaaaaaaggctaggaacttatggaagactttagatttgaatatttattatttggagagcctcttcggtgttttatgtgttgcttaccccatggggagtgggaggcctgtccctcatgtcaaggtataatgaaggaggcttcaggagaaccacttagaagactggacaaggtacctatggaacttgggagacactgaccactgcctggtttttatctggataaattttcaaggtcagaggccaaaaggacttctcctgatggaatagcagggggagtgggcaatagtgggagctaactgcactaccattgttaggtgtaaggccaggaaggtcactgaatgggacttgtcttacaaagactctgcctgagaggtcttcctgccaggattagataaccccaatagaaaaagcctgtatgggttgtactgccagaagcagaatctgagaggagagatacaagtgaccagctggagaaggtatatcccatgccaagatcaggagcagtggggtgtctccttgttggcagggagaggtctccaaataactcataagttccctaagaaagaaaggcagaattttggtatgtgtcacaactagggagtactaatgccacattatcactgctccttccaagaaagactttgtcattgtgcctatttgtttttaccctcccccctcctttccacttgctcctaccttggcaggtccagagacacaaaggtgagttggggaggaagattaggagaggaaggtgggaaagcagcgaagctgccaaaacaaattacctttacatattgcagatttctggggctgtcagaatgtagctggagaaggaagggaacttgcaattgcagaagacatcaaaaatttggtattagactggactggacttgttagaacctaagagtgatactgttggttaatacctgaaggttactggaaaagatttgggatcaaccaaagtgcaagaaaagggagatctcacataaagtaattaaaagcagtggtctaagaaaaataaggctattttatgtttttatcccactcaatccagttcattcaacagactgtttataggcattttatacttagtgtattcataaaacagagctcttaattttcctcctgattttctgtcatggcctgactaacaacccagttgcacaagccaaaatcataggagttttctttgactcctctctttttttctatctccacatcatatttatgagcaagtcctgttgactgttcctccaaaacaagttccaagtcttcttattttacttcttgtaaaatccaaattcatccaaattcctgtggcctgcaaggtcctacatgttatgtttcctttttgaccatattttctgttactcctctgctgattcactgtgcttcagccacactttacttgactataccaaacttatttctgcctctggacgtttgcatttgttttatctgttttcaatgctcttccactagatctttgaaaatcttgcttctttttcattagtcagatctctactcaaatgtcacctcctcagagaggcccttcctgactactacactgaaagtatcctctacctcctgcctcatcactttctagcagaccactatcttttatatttataacaacttgaaattttcttatttatttctttatgtgcttaatgtcttgagaatatgatctccattatctgtcttgtttgctactgcacctccagtgcataagacagttcctagaatatagtaggaactctagttgaatgaatgaatgaattgaatgattgccagaaatcttgcctcagagcaaccataaggttaggctgatgttggcagcaagcaaatactactttttgtcagtaattacaggggcatgcttctccactgtgaccttgactctaacttttggaataacaggttttctggagtactatccccaagtaacctttggcggacatctcattcttacaggtctgctaggtcctaccatccaggctgaggtttatgatacagtggtcattacacttaagaacatggcttcccatcctgtcagtcttcatgctgttggtgtatcctactggaaagcttctgagggtgagtaaaataccctcctattgtcctgtcattctatgaatagaacagtgagatgtgtgtgctttgtaatggtggcgttacaactcttttaaggtcctaactgaacattatgtgtatttcttaacatttactagattataaatatctcaagatagggaaatccatcttatttattgctgtgtccttagcatataacatattgcctaccctatagtagatactcaatacaagaatgagggtgtagtggacaccagtcattttttcttcctaaaattaaacatttctcacctgtataccccctaggaattgcttttctgaatatacttcaaacagaacctgccattttcttaaagcccatgcctccctagccatagcagttgatctaggagtgagcagttgacacgggtatcccacctccttggccacagttgattggtccagagatgggcaccttacccaagctaggccaatgagagtacttgcactagcattttgaaatttatgagaaaaaggacctattattaccaggtaatcctatacttaggggatggagcccaaatataataaaatcaagattctactacttcatgtatatcatgtgggccatggatcttataggagtcttaagggggtgttggtcttgtccttttcttagttgcctagctctttgcaggcatggtgcaaaggcaggacaatctacctttatctgctccttctataccactgatcctaccctaaacatgtagctgtataatcagagacaggaagccatggcaaatctggagggtctcggcttggctatatcttaaagagttacatgtattcgtagttcaacattggggaaattttccaaaaattggtggagaaacgagtggccaatgcaattttatctttttttttctgctgacatcagggagagataagagctttaaaatcacaattatggggagataatattttaaaatccagctcaagttaaacccatcagaaaaggtaacaccttttgggacccccaaatggccacatcttatccaatgaggggacaccaaccatagagtctatactgcacagttcaaatggtagccatgagctatcaggcacttgaaatgtggtgagtcctacttgagacatactgtaaaatatacaccagatttcaaaggttaagtacaaaaaagactaaaaatatctcattcattgtttataagtacaagttgaaatgcttatatttggatatactaggttaaacgaaatacattattaaaataatttcacctgtttctttttacttttcttaatgtgactaccagaaaatttaaaattacatatgtggtttgcattatatttctattgaacagtgaaatgtttagcatatgttgaagttgctgctcctgatgcagtggctcatctcagatttggccaagttcttctgtccaaggaaaactaggttcaacccattcctggagaggaacagactcaaatctttctgggctgggtcacttaccttggttaaatctgttctccacctattctaccaacaaccaaagggatggacatagctgaaataaaaatcacgcaatcacactgaatggtatctcacctcaggtgggccttcagcattgcctagccattctactgctacatttcccctaatccatttactctccctctccccaagacagctataatgtttcacacattgttagcctctcattgaacctccaacatgtgctcccgcccctgcccccaccacaacgtgagccttgggaaaaagggtatttttttcctaatgaaatatttcaaacaaagataaatacagaaaataatataacaaacaaacatgtgcccatcacctcactttgccaaatcttaacattttgtcatctttgcttaatttattttacaaaattaagcattttacatacagtctgtactcctctatggggctggcaggaaaaggctctcattgtcaaagttcaaagtaattgatcattgaaaaaataatgatcacattaaaaacaacacttatataatagagatacatattgtaatactcataaatgaaatgatatcctgtctaggattggcttcaaacacatccaagctgatgttacaatcattaggtgaattcctgatgtggaatttgacatttgtatggcgccaaaataatatcccagtgatttttttctgattgtaagtggaaatgttaactttagaatggaggtatcaggctaatccacaggtcagttttagtgtcactaaggatgggatggccagatattatctgcccctgatatggcacaatatgagggactcagcatcatctttgatatattttagccaaaaaacttatttaatttgaatctaatcagaacttaggcatattcaatagcatgggatattctacaggactacaagccaaatttctttcaccaaatgagtgtcagaaaaaaagggactactccatactaaaagagactatgggcctaaacaaccagatgcaatctgcagtcttaggttggattctgatttggaccaactagctacaaaggatgcctttgaggcaattaagaaaatttgaatattgcattgatattaggtgatattaactggatcaggtgtgctagtgtcattttgtttatgtgggcaatttttttttaaagatgacttctaaagtatataggagtggactatcatgaaatttgtaatgtacattaaaatgcatcatcataaaaagtgtgttgaaagaaaaaagtgaaagtagcagtgcaattctaagaataattttctaacatccactcacaaaaatattaaattctttatattaaacacatgaaaaagaacacaaatatatctgtctttcaagattcatctcaaattccacctccttcatcaagcattactgaagagtaggaagcttgtttactttttttatccactgtgttgctcgctccaagggcatagagacttctatcttgatctttatattttcagcttgtagctgagtctggtaaagaataagaactcaataaatatttgtgaataaataggtgaatatttccacatggtattataattatatctttatatgtctatgtcccccaccaaacatagtgttgtaccactaggaaagaacaaagtttaagaaattttcttaaatctctctttcttactgttccgtgaccctcactagtgcctaccaaagagtctgtgacaaagtgtatttgttgttgaattgaattaggcaaaaagatgcaataatggaagcaatttattatttaacagaatgtggagatatcaaccagaacctagtttttactgctcatgctagggttagtgatctcaagatcctctggagtatatgaagcttctccccatttgtggctgctgcttgttagtttttcaaattaagatgcagaaagtaggccgggtgtggtggttcgcgcctgtaatcccagcactttgggaggctgaggcgggtggatcacaaggtcaggagtttaagaccatcctgaccaacatgatgaaaccccatctctactaaaaatacaaaattagccgggcatggtggcacgtgcctgtaatcccagctgctggggagtctgaggcaggaaaatcacttgaacctgggaggcggacgttgctgtgagccgagatccagcctgggcaacagagtgagactccgtctcaaaacaacaacaacaacaacaacaaagatgcagaaagtccgtttcttatgtagaacctattggtgacaataaacttgacatgtttctttgagtgtacagtggatatagaaaggacaattttatttcttcctgctataggagctgaatatgatgatcagaccagtcaaagggagaaagaagatgataaagtcttccctggtggaagccatacatatgtctggcaggtcctgaaagagaatggtccaatggcctctgacccactgtgccttacctactcatatctttctcatgtggacctggtaaaagacttgaattcaggcctcattggagccctactagtatgtagagaaggtaagtgtatgaaagcgtaggattgagatgaaataagcagagaagtacaaacaactgaatctatctataacagttagcatttgtgttccttcacctgaaagaggcttttttactctagcatcatgctcatggaaaggagaataatccagtttctgagagaagcagatatgcattctatataaccacaataaactctaagctgggatcaggaggagctgagttccagaattaaatctctctcctcaaagcattgctattttcctcttcaaatctgtgggctttatcagtagtgatttctactgtcctctgccttttgcaaactttgagctaggttccttgaaaacttcatggaggtaaacacatccaagtgtgtgatcaatggcatatagactggttcaggtggttagtttgtcatctgtaaaccaaaagtatataaaaatctaagaaaagtcagcatttatttatatgttactgaaaattaattaatttggattgaattaatatattctaaaataattctaatcaaacctgtttttaatttataccttagcataaattagggaagtaaattttgcataatttgtttttatcctattttttatggtgaaatcagcttcactgtaccttttccttgttccatttatcttttactgcataactccacaatttagtggcttaaaacaacaacagtctcttattatctctcatggtttctgtgagtctcatggaatttgtcagtgttttgacttggtggcctatctaagtgtgtctcatgaggctgtagtcaaacagtggctagagctgaaatcatcccaaaggtgactttattcacatgtctttgaccttggcttgatggtactctccacatgatctctctcacatgggttttacagggtagccagacttcttatatggtcctgagatagcccattagaagctgtttcacgatttctaatgtaaccttggaaatcactcacataacctacattctattagttagaatgcatcactaagaccagtctataaagggagactccaccttttgatggggaataggcaaagaatttattaacaggaatcaccatactctttctgaatggtgatgatgaatgtgattcaaaaaaaggatgggagcggggagtggagaagatgagaaaggtttgtagtttataatagtttcagatgaaagtatgatttctcatatactgagttcagtttcatagtcataattaatgagaaagtgccaaaaccacagtgtattatttatgggatgtaaaggctaatggaacaatgagatcatcaaaacattagtgtttacatatgacatataaagaaataagttaaaaacccaaatgattctttgacacagagttgaactaaagagtctacagaggttctagttccaggtgaaatggataaacacactccaccctttatttcccattgaacttaactataaaaccttgacaaaatgcaaagcccagatatttaaaaatttctaaaaagcaaatagaacaagtatatagagaaaagacactagaattgaaagtattaccaaacttgtgggggagtatacctttttccccactctagtattccttaacctgaattaaaacataactggagacttcgaagtgagtactatgttgcaaagagagctccaggacaaaccctctggggtttcaaggagtgagaaaggtaactctaaatgctcagagagcgtgggaggggaaatcccctagggtttttgtcctcttttccaccattctctcaagcttcagtcccaggttgcctgtggcaatgacagtggctggcaacagaaacctgccggagtaaaaacttagggaggggaacattattcttcattcagtacagctacagatctaagacattgggggaaaagcacattactttctctctgtctttccccttccattgcttgaccttagctatgatgtagttgtggaaattggaagcttctggttagaaaaccaaaaaagggagctcacagaactggaaagtttatagatgacagagagaaaagatcccaggaaagtaaacccataaagttgtgcattaactcctggattcacccccaacctacacatccaggtatgtagtttcagtgtcagatctgttttaaaccccttgcagtgccattgagtccaacgcagtggccagtctggtgcttgaggggaaatctcagtttcacagtcttcaacatgttccattagcctttacgtcccataaataacacactgtggttttggcactttctcattaattatgactatgaaactgaactcagtatatgagaaatcatactttcatctgaaactaacgcccacagaattccttaaaacatgtctgatggctgaaagcaaagatagaacattgtgagataggttttttaatgtatggtagatacaatacataaaagaatcatagcataacaagaggagggtaaggaaaactttatggtccattcaacttcattccaattcaaatggtaaaatgttgactctaagtagatgatagtgaaaggttaagtatgtattttgtaatccctagagcaaccaataaaaaattataccaagagacacagtaaaaagtcacaataaactaattacaatggtatatcaaaaatattcaaataactcaaaagaaggcaagtaaggagagatgaaaatcagagagaagaagcagtaaaatcataataaaatgataggcttaaatctaaacatatcaatacttacattaagtgcaaatggctaaaacacaccaattaaaaacagagattagcatactggatataaaagcttgaaccaattatatgttgtttacaagaaactcatttcaaaaaaatgatataggtaggttaccagcataaagatggaaaaggatatatgatgcaaacatgaatatgaagaaagttgaagtagtacaaatctgtaatcacaacattgatttttgccaggagtgccaaaaccattcaataggggaaagaatagtgtcttcaataaacagtgctgaaacaggtgaatatctgcatgcaaaatactgattgagtatcccttacctgaaatgcttggaaccaagaacgtttcagatttcagatactggaatatttgcacatatataatgagatagcttggggatggaacttaagtctgaatatgaaattcattttggatataaatcccttgccagttatgtgattggcaaatattttctcccactctatagtttgttttttcattcttttaatggtgtcttttataaagcaagagttatatggacaaacatatgaaaagatgttcaacatcattaaccattagggaaatgcaaattcaatcaacagtgatgtatctattagaatagctaaaataataatataaaattgccaagaatcctgtcaagaattcagagcaacagaaagtttcacaatgcacaatggtatagccattctggaaaacagaatggcagttttgctgcttggtagagaaacagtctctggcagtttcttgtgaaattagatgtacactatagagggatagcaggagggagttctttttggatattgaaatggatctgtatcttgacgatgatggggtttcatgagcttatatctttgttaaaagttatagacctatacaccaaaagaaaaagtcaatttcactataattgaaaatttatataaaagtaattagaatgttttaagacagctttatacgtattttaaatgtgtctctaaagtttttaatccagtacttctggtaaagatggcacagggtcttcctacttagccatttttccatcctccacctcaaccccaacctcgctgaaaaccaacaacaaagataggtaaaccataaatagagaaaatcgaataggcatggtcagctgaaaaagaagataaatatttgtggaccagaagcagaacaggaactgtgagtagtaaaaggggtggaaattacaggccaactgagatctgggtcaggaagccagctgcggtagccaaggagtcaggatgacaaggataaatagtgctccccaccagagggactgagagcccatatcatagagttgggctcttcttcacttgaaagagagctgagcacagctgctgctcactctttgtttagggccatggctttgtggaaactcagagtcctagaagaggggaaagcaaacccagtcctagaataggaactgaactaagttttcttggttcagtgggggaatctgcaatatccccaaggtttccattggccagtatctccaaaattccattctagggtatgatttgctagatagagaatagtgaacacatcctttgcttaatcaaccaatgatcacaagggacagcaaagatcactatagttcaacaaagtcagatttattggctcatggcaacaagagactgtggacacctccctaaacaaagggaaatactgtatagagttagtaaagaattttggggaagggtggaggttaggtgatatttaaatgaagcaaagtagagttgtgtgtaaagaaataaccatgaggtctagactgtgaagtgttctaaaaagttaacatagacatgaaaggttaagtcaaggcaccccttacctgaagcttgagctttaaattgagctgcttctttgtgtcaaagtaatttagatgacctaggaaagaatgagatgtttcattcttgttgctattagttcaaacatttctggcaggctgtgaattcagagaacaaacaactcaattgagtaagaaagcaagagataatcaaagcaaatagttggcattcagtgagtttatacagtggcaatgtgtccttgggagaaatggtgttgttaactctgcagttagctttatctatgtctcttatcccagcctgatgagtagcagcacacgtactgttgctttcttagtccaagctaatttttatttctaagcattaagggtgcgagagagagaaagaacggcaaaatgtcataaacaaaaatctttctactcaaaataagcctgtaaacaaaagtttccagtcaaatttaaaaaatatataattctaagaaagatagccaacaagctcaacagttaaagcatgaaacaagctagtttgttccattaaaaacttcagctatcgatatacacggtatttatttaaaatgtgagtataattagaagcactgtgggctattgaaaaaaaatcatgagtatagatgtttaatatggacaattgctattttactcaaaacttttaatttacaattgcagaagtataaaaagttacaagagtaacagaaattatctataatttcactattatcacacagtgtgtgagggcttgtattttgtaagtgtttttaatttttttctttagtaattcatttttatcatattttacacaagtagtggtcttcatcaaagttgaaataaaaaaattctttgctccagatagttttagaaacactgctataggagacctgacatcaaagccaagttatcaagagacagaagactacatttgttcttactgtcaagtaactgatgaagaactgtctcctcctagtgacaatttcctacaatgagattttttaaatagaagataaatgttctcacttctttttcagggagtctggccaaggaaaagacacagaccttgcacaaatttatactactttttgctgtatttgatgaaggttagtgagtcttaatctgaattttggattcctgaaagaaatcctctgctactattaagaggaggtgattatagaaagatcataaattacattactgttcaggaatgaaggagatggggttaaaaatgaattccaagaaaacaaaacgtaacctcagttccactggcagctatgaggtaagaagatagaggagctggataacggactggcctcatccccctcattaagactgtcaacaaatactttgggctctactttctaaatactttctcttatcttcatctattattaagtgcacaacctttggcaagttatttaacctctctgtgtctcggtttcctaaatggaaataatagtacatttttcataagattgttgtgagtgctgagtgatttcacttaagtaacctagagcactgtgtggcatagagtaggccctcaatagtgttagtacctccgcctcttcctcctcctcctaatgtaatcactatgtaatcatagtaacataatattcttcttgcccccttatcaatttacattgccatcttcttaattgaggccctcatgatctgtctcataactctcaaaggaagcttactgaagtgagtatctgatcttgtcactctagcctctacaatacttcagtttgccagtttcggtggctcatgcctgtaatcccagcactttaggaggctgaggtgggcagattgcttgagcccaggagtttgagaccagcctgggcaacagggcgaaaccacatctctacaaaagaattaaaaaatcagccggtcatggtggcgggtacctgtactccagctacttgggaggctgaggtgggaggatcacttgagcccaggaggtgaaggttgcagtgagctgtgattgcgccactgcactccagcctgggtgataaagccagaccctatctcaaacaacaaaacaaataaaataattcaatttcaaggtaaagtgcaaaatgcattatctattctctggtgacatttccagccttgttgtgttccatttcctgccttatcttccatgtcacccaaatatgtaatgctttttcttgcatgagacctctgcatatgcagtttcctctgcctggaaaaatctgtctccctctttacactaagtaagcttctcctttttctttaagtctgacttacttcagttatccccttccttaattccttctcccaggatgacctctagtctggattagatgcctgcttatatttccacagcatcttgagcttattccttatcatactatatcagtattttctactttatttaatatttatcttctttgatctcatatctttttcccttcaagcaaagtgaaatttcttctcctctctgctccctgtaacaccctactctcatctttattatatcactctttactctttattataattatcagcttctctgacgattccagctagagtgtaagcatcttgaaagcagaggctgtatcttcctctctatcatcagtgtctacaattagtagtgctcaataaatatgtgtttgaatgaatgaacaaatgaatggctgcctcataaagttttagcactagctaccagtccttcacacaaaggggtaactccagggagtcactgttcaatagtatttccagtgcttcagcccttatcaatttcagagacagtgttagggagctttcaggttcctggggtttcataaatataagctgggatgaagcaattataacggagacagggactgacagacagcctttttcctaggacaattttcttttttcttttcttttttttttgagatcgagtctcactctgttgcccaggttggagtgcagtggcacaatcttggctcactgcaacgtccacctcccaggttcaagtgattctcctgcctcagcctcctgagtagctgagattacaggcacatgccaccatgcccgcctaatttgtgtatttttagtggggatagggtttcaccatgttggccaggctactctcaaacgcctgacctgaagtgatccacctgcctcagcctcccagagtgctacgattacaggtgtgagccaccgcgcccggcccctaggatgattttcataagctttcttttaaataattcagctaataaaaagaattgaatcctgatgcctcaagctaaccaatattctgtcttctattattatccattcccacttattgtcatggacaaatggagggagagaaaatcagtttgagcaagagatgtctgcctttacataattatcttctccctccctcacactgactttgagaggataagtgctgtgtgcctactttgctgacaaaaatgcttaaggtgtgagcacactgggagcagggaaggagaaaggggaggcggtcattcatgagacacatgcttagctgactctatctttgccttctctctcatcagggaaaagttggcactcagaaacaaagaactccttgatgcaggatagggatgctgcatctgctcgggcctggcctaaaatgcacacagtcaatggttatgtaaacaggtctctgccaggtatgtacacacctgctcaacaatcctcagggtcttccaaattcagcaccagagttctgtacttcagttcacaaacagctcggcatctcagaggatatagcccactgaatacttgaagatctctggcctctggggatcttaatgtatagtaggcaattcctcttttggtcacctgaaaatgaaggcttacccatgtacatacagcccacagtcagatttttctttccttttcttaaatgtgagtgggcaaccaaggatgaacagacatttaaaaagaacctaaaatatggaagggatatgcaaagatgaacaaagaaaataataatcccagaataaaaaaagctatggctcagaacagaactcatcggaagctcttacttctattttcataaagattcaagaagatactgcatcaataaagtaacaataagatgccttccagttttaaaataggggcatagaggcaggctggctttactccctctcacagaaaaccaaaaccaaacatacagcaccaatatctacaccaacaacaacccagagctcacatgtgaggatgagacagttcccggagccacagagaagtgaaaaaactttgagaatcagacttccacatccatgactctccttcctcctattctgcccagcaccaagtgtatggaaaatctcccctcaactcatggtttctacactggaaaaagtgacattgaggtgttcaaccagcttctccaccttcttgggttccctggggggagatttgtccttgccttaacccacagaaaacatcatgactgtctgaaggcagaaatatcccagagtacaggcagagacaaatgagggaggaaggactaccatccccagccctggaaattctgctctataatttggccaaagacatgcaaattcagaatggccgtgcagcagcaccatgctgtagcaggtttatcctacaggtcaccttggcatgaatcactagctggccttccaacactgctatgataatccctttgggacctcacccacttgggacaggcagggctctgaccacttactggaacacctgtaatcccagcacttgagctcagcacaataacaataggagatggctactaccgttaattttatgcagttacgatttaatactggatctttacgtttgtttacatttgtcccaactggcaccttcatcacctccaccctccccaccccagactatggtaaccacgattctactctctattttcacaagatccactcttttagctcccacatgtgagtgagaacatgtggtattgccctgcagtgtcacctatgttgatgcaaatgaaaatattcttttttatggccaaatagtattccattatgtatatataccactgaactgtacacttaaaaatggtaatgatggcaaattacatatgtatattttacatcaataaaaagaaacttaaaaataaggtaacaataggattctatgaaaaacaatcataacaaaacgtgctcataaaaattataaacacaatggtcaaaatagaaactcaatagaaagtactaagaatagataaaatctttcataaggtcaaacaaaatgtggttgagaatatagttgacccttgaacaatgtgggggttggggtactaaccccctgcacagtcaaaaatccatgtataacttttgactccctccaaattcaagtactaatgacctattgttgatcagaagccttatcaataacataaacaacaaatattttgtgtatgtattatatgctgtatattttcaataaagtaagctagagaaaggaaaatgttatttatacttttctctgcttcttgggagtacttccagcatcactagtggcactttatacgggtcccaagtatccttcaaagtttatggagagatgaaatgcttatgcagagatgattagcatcatgcagagttttcagtggatgcctgcagcactcgagctcagcacaataacaataggagatggctactaccgttaattttatgcagttgcgatttaatactggatctttacgtttgtttacatttgtcccaactgggaatggtgccatgtatggttgtaagtatgtaagtttttataaatttcaactttttataatagatttttgtatattttatggtaataaatgataaaatagtctagtatcaacatgtatatgtatatataagtgtgtatacatatatatatatattttttttttttttttttttgagacggagtcttgctgtcgcccaggctggagtgcagtggcgcaatctcagctcactgcaggctctgccccccggggttcacgccattctcctgcctcagcctcccgagtagctgggactacaggcgcccgccacctcgactggctaattttttgtatttttagtagagacggggtttcattgtgttagccaggatggtctcgatctcctgacctcgtgatccacccgccttggcctcccaaagtatatatatatattttttgagacggagtcttgttctgtcacccaggctggagtgcagtggcacaatctgagctcactgcaacttccccctcttgggttcaagcgattctcctgccccagcctcccaagtagctgggattacaggcatgtgccaccacgcccacctaatttttgtagttttagtagagatggggtttcaccatgtttgccaggccggtcttgaactcctgacctcgtgatctgcccgccttggcctcccaaagtgctgggattataagtgtgagccactgcatccggccatctccatatattttttgcattcataacatacctttttcttaatttttttgatatttttaccctatgtggtccatctgacagttttttcaaattgtcataaatttccaaaaaaatctcactatatttattgaaaaaaaactgcatataagtggactcatgcagttcaaacctgtattgttcaagagtcaactgtgtgttttaaagcagattttaacatcaagaaatgatagaaaaatgataagaattaaaagagataaatattcatattagaattgcccatcaggagcttctgagtagctgaacgcatggaggttcctggagagtggctggccccatgccccttcccacatacccttccttatatatgcatctcttccatctggcgtttataagaaaaggtgctgactgctgaattataaggacactgtggtctactagataaaggttgaggagaggggtttgggcttctattgtcttctttccgggccttcatctcctgcttgtgattaagtagtgcatgctgagtggagcaaagtggtggaataggactcttcagcaataatctcctcacagaaacatcaaggtaacaactcgatgcgtgaaattaccttcagaagagttaagaaaacctgaacccatgagcaagactgtgaagcccttttggactgcaaagacgagtaaaaccatagttgcacataaaggggattggttctttatgactgagaccccacccgcaagccactgcagtaccacaggcggaaagtcaccatggacccacggtttttacaccggaaaactctcccgtatggcctgagtgccctctgtggatctccactaattagtagcagagccagcatgagacttgcgtctaacctgggctcagggcgccctctcgtgctaaaaggaaatacaacagccagtcctttcactttctttttgatatggtctctgttgcctaggttggagtgcagtggtgcgatcatagattactgcagtcttgaactcctggctgggctcacacggtcttcccacctcagcctccagagtgggactacaggtgtgtgccactatgcctggctaaattttcgggttttgtgtgtggggtggggaagattggggtattgctatgttgctcaggctgggtctcgaactcctgacctaaagcaatcctccagcctcagcctcctaaagtgctaggttacaagtatgagccaccacactcagccccactcaatttctaaacgagctcactgaaatagagcagtcacaaacaaacccagactgtgaacatgagaataaatacctaattcttcaatgtgtagacagggatgcacatctgcaaagaataagaatagcctaagaaagacagcctcaacaaatgaacaaaaaatcgtgccagtgactaatcctaaagacatgcaggtgaatgatctggtagacaaagaattcaaaatagctattttaagaaaactcaacaaacttttataaaacacagagaaacaattcagaagtttatcaaagaaatttaacagagaaattgaaggaataaaaaaagtcagaaatcctggaactgaaaagtataataaaaaatgacacatgcaatacaagacatcagcaacagaattgatcaggcagaagaaaggatcagcaagctcaaagacaggttatccaaaaatacaatcaggaggggcttcaggatggttgactagatgcatctagtgttcatcccttccatggagaggaaccaaagtagcaagtagataattatactttgaataggtcatctaagagagaacactggaattcaacagagcagtgacaggaagcattgaaagcaagggaggagagagaaataaggcctgtttgcctgggattggctgggagtctggaacagcttcctaatgtggggaaaaggtaagagacccttagtgttcctcattttcaccaaggactcttgcaatcctagccacaggagagcgccttattccttgacagcacagagactagcatagggagttgcctaaagaccgtgtgaaggcattgcaacagagagctcacgctggattctgcaattctcccaagcagctgcagcacagcaccattttgagaacacagcccacacatcctgccctgctatgatggccgtgacttaggcaggagccctgagcagtgatcctgccccacccagcagaggagtgcccatgcattttcacatattccaagaacaaattccactacctacaaccactgctgctgcaggctgctgtggggccaaaacactagtgaaccttgtgctcccaagctacctgcctacagctactccctgagaaagcaaccccaccttcaccaagagcagggctatagcacagctactgctgcaccccaacctgagcattttgctagtgacctcggtatcaccccacccctgcatagcacaaccagcacctcacacaccaccaaggagcctgagggcaggttcacgtagcccagctctacctgcccccagtacccaagcatatcatccaggggcctagggatcacttagccctgtccaccactggtggcacctgagcacctcctggggtctgaggtcaggcccactcaacctgccactactgccacagttagcactcactgcatgcaccacttgagggtctggagactggccatgcgatccatagcagccacaaccaacgccagcacagaccacttgagattcaggttgtttcattgctatgattgccatcaaccatgccactttgctgcccaggaacttgagaacccacccacccatgtgatccatcaataccacttctggcacccaagtaaaccacttggaggcccacaaatcaacctgcctggacctaaaaccagtgcaatcatatgccaccatggtacaccaaagacaagcacactcagcccactgctgccaccattggggcctgaagacaggcctacctggcatcccacttctcagaaaaacttcaccacagcctccactaataaccacaccctaagccactgagaaaatcacaaatatcactgatgctgtttagaatcttatacagaggctactacattcaccgagaatcaaaaccgaagtgctctacccaagcaacaccacagatacatcttcaggaaaaagttctttcctacaaaagcaaattttaaaaattggaaaaagtgattattacaccagatgtgcagatatcaatgtaaggacacaggaaacatgaaaaatcaaggaactatgacactccaaaggagcacaataattctgtagcaagagatccaaataaaaaaaatttaagatgggtacaaaaaaatagaaagaatgaataagacctgctatttgatagcacaacatggtgactatagttaataataacttaattgtacattctaaaataaagagtgtaattggattgttaataactcaaaggataagtgcttgagggtatacatacctcattctccatgatgtgtttgtttcacatcacatgcctgtatcaaaacatctcatgtgttccataaatatatacacctactatgtatccacaaaataaaaaaatcatagtttacaagcaaaacagtatatgtgaccattggtttttaagtaaactggccaacatctctttaaaaatttatgaaatcctggaaaaataattccaaattttgatactaaataaactcagtgagatacaagagaattctgaaaaaaatacaaagaacacagaaaaacaattgaggctatgaaagagaaatttacccaagagatagatatcaaaaaagaaccaaacaaaaattctggaaccaaagaattcattgaatgaaatacaaaatagatttgaaaggttcaacaatagaccggaccaagcagaagagtatcagaactgaaatacagatcttttgaaataacccaatcagacaaaaataaagaaaaaagaattttaaaaaatgagcaaagatttcatgacatattaggcactataaagtgaccaaatatttgaatcttcagtgtcccagaaggcaaagagaaaatgaagaggttagaaagcctatttaatgaaatattagatgaaaaatttccaagtctaccaagagatttagacatctagataaagaaggctcaaaaatacccaaataaatacaatgcaaaaaggtcttctccagggcacattatagtcaaactatcaaaagtcaaagaaaaaaatttaaaaatagcaagagaaaagcatatagtcacctgtaaaggagccgctatcagactaactgtgaatttctcagcagaaactttacaagccaggagagaatgagagagagagaaaaaaaaaaaaaaacacctgccagccaaggatactgtacacagcaaaattatccttcataaatgaaagagagagaaaaatattttcagacaaaaaaaaactgaggaaattcattgcaacctgatctgctttacaggaaatgctaaagggagtttttcaaactgaaagaaaaaggtcctaatgtgtaacatgaaaacatctgaaggtataaaacccacaggtaaaagtaagtatcccgacaaattcagaattctctaacatggtaattgtagaacataaatcacttatatccttagtaggaagattaaaaaacaaaacagataaaaataattaccataacctgttaaagaataagcaatataaaaagatgtaaatgatgacatcaaaaacacaaaatttgggagtcgattttttaaaaaattttcttgcaatcaaaattaagttgttatcagttcaaactaacttgttataactataaggtattctgtgtaagcctcatggtaattacaaagcaaaaatttttataatagatacactaaaaataaaaagcaagggattaaaacatactgatagaagaatcacttaaccacaagggaagagattaagagaggaagaaaggaacaaaggatctacacaacaactagaaaacaagtaaaaatatggcactaccaagttcttacctatcaaaaattaccttgaatacaaatgggttaaattctccaactaaaagacatagagtgtttggttttttgttcttgcgatagtttactgagaatgatgatttccaatttcctccatgtccctacaaaggacatgaactcatcattttttatggctgcatagtattccatggtgtatatgtgccacattttcttaatccagtctatcattgttggacatttggaccgcatattctcactcataggtgggaattgaacaatgagatcacatggacacaggaaggggaatatcacactctgggaactgttgtggggtggggggaagggggagggatagcattaggagatatacctaatgctagatgacgagttagtgggtgcagtgcaccagcatggcacatgtatacatatgtaactaacctgcacaatgtgcacatgtaccctaaaacttaaagtataataaaaataaaaataaaaaaatttaaaaaaagacatagggtggctgaatgaatttttttttaaaaaaagatctaactacatactgcctaagagaaagactttacctgtaaggacacacatagactgaaagcgaagggatagaaacagatattccatgcacatgtaaacaaaaagaaagcaggaatagctatacttatatctgataaaatagacttcaagtcaaaaactataaaaagagacaaacagccagacgtggtggctcatgcctgtaatttcagcactttgggaggctgaggcgggtggatcacctgaagtcagaagttcgagaccagcctggccaaatggcgaaactccatctctactaaaaatacaaaaattaaccaagcatggtggcaggcgcctgtagtcccagctactcgggaggctgaggcaggagaatggcatgaacccgggaggcggagcttgcagtgagccgacattgcaccgctgcactccagcctgggcacacagcgagaatctgtcaaaaaaaaattgacaaacaaggccattatataatagtaaagaagttaatacaacaggagaatgtaacaagcataaatatatatacacccaacattggagcacctaaatatattaatgtttgatctttgtattttctagtctcattaaaagtaagggcaaaaactacaattacttttgcaccaacctaatataaagcaaacattaatagaccaagggggaaatgaagacagcaatgaaataatagtagaaaactttaacaccccactttcaccaatggacagatcatccagacaaaatatcaacaaagaaacactggacttgaactgcactgtagaccaaatagagcaaacagacatttacggaacattccatccaacagctacacagttcacattcttctcaactgcacatggaacattctccaggagattatacattaggccacaaagcaagtcttaactaacttttttaaaatgaagtatttttttcctgccaataatggaataaaactataaatcaacaacaggaggaacaactgtacaaatacatggaaattaaagaacatgcccctaaacaaacaatgggtcaatgaagaaattaaaggagaagttaaaaaatttcttgaaacaaatgaaaatggaaacataacatgccaaaacttatgggatacagcaaaagtagtccttaaagaaaagtttatagcaataaatgcctacatcaaaaaaaaatctcaaataaacaacctaatgatgcatctcatggaactagaaaaacaagaacaaacaaaaccccaaattattagaagaaatgaatgaatacagatgagagcacaaataatcaaaatagaaactaaaaaatacaaaagatcagtataatgagttagttagttctttgaaaagataaaaaaaagtcaataaacttttagccagactaagtgataataaagaagaaaaacagaaataaatcagacatgaaaaaggagacattacaactgataacacagaaatacaaagaattataagaaactactatgaacaactataagccaacaaattgaaaagcctagaagaaatggataaattcctggacacatacaacctaccaaggttgaatcaagaaaaaatggaaattttgaacaaatcaacaatgagcaacaagattgaagcaaaaatacaaagtctcccatcaaagaaaagttcagtacccaatggcttcactgctgaattctaccaaacatctaaagaactaataccaattcttcacaaactattcaaaaaattgaaaaggaagaaactcttccaaaattattttaggaggataatgatcattatcctgatcccaaaaccagacaaaagcacaataacaacaaacaactacaggccaatatcctcaacaaaatactagaaatagaattcaacagcacattaaaagatcatttaccatgatcaggtgggatttatcccagtgatgtaaggatggtttaacatatgcaaattaagaatgaaggacaaaaattatattatcattttaatagacacagtaaaggcatttgacaaaattcaatatcccttcatgataaaaactctcaacaaagtatagaaggagcatacctatatgataaacctacaaacaagatgaaactgagtggggaaaagttgaaagcttttcctttaagaactggaataagacaagcatatccaccctcaccacttctattcaacacagtactggaagtcctagccagagcaattaggcaagacatccaaattggaaagaaggaagtcaaattgtccctgtttggccaggctcaatggcttatgcctgtaatcccagaactttgggaggccaaggcgggcagatcacttgatgtccagagttcgagaccagcctggcaatatggtgaaaccccatctctactaaaaatacacacacacacacacacacacacacatgctagccagacatggtggtgcgctcctgtagtcccagctactcgagaggctgaagcaggagaatcactagaaccccagaggcggagcttgtggtgagccaagatcgcaccactgcactgcagcctgggcaacagagtgaaacactgtctcgaaacaaaaacaaaaacaaacaaaacaaattgtccctgtttgcagaagacatgatcttatatatagaaaactgccaaaactacaccaaaaaactgttagagctagtaaatgaatgtagtaaacttgtagtctacaaaatcaacatacaataattgatagcatgtctatatgccaacagtgaacaatctgaaaaagcaatcaagaaagcaatcacgtttacaatagctacaaaaaatgtccagaaataaattaaccaaggaagtgaaagatctctataatgaaaactataaaatattgatgaaagaaattgaataagacacaaataaatggaaagatatttcatgttcatggattgaagaattaatattattaaagccaaagcaatctacagattcaatgcaattcctatcaaaattccaatgtcattcttcacagaaatagaaaaacaatcctaagatttgtgtggaaccacaaaaaatcccaaagagccaaagaagtcttgagcaaaaagaataaacctggaggcatcacactacctgatttcaaattatactacaaagttatagtaaccaaaacagcattgtgttgacataaaaacagacatatagaccaatagaacaaaatagagagcccagaaatacacccaaacatttaaagccaactgattttctacgaagttggcaagaatacatgatgggtaaagaacagtcttttcaataaatggtgctgggaaaactggatatccatatgcaaaagaatgaacctagaccccctatctctcaccacgtatgaaagtcaaataggccaggcacagtggctcatgcctgtaatcccagcactttgggaggccaaggcaggcagatcacttggggtcaggagtttgagaccggcctggccaacatggtgaaaccccgtctttactaaaaatacaaaattagccaggtgtggtggcacacctgtagtcccagcaacttgggaggctgaggcaggagaatcacttgaaccccagaggtggaggctgcagtgagcctagatcgtgctattgcactccagcctgggcaacagagtgagactctgtctcaaaaaaaaaaaaaaaaaaaaaaaaaagaaagacagaaagaaaagaaaagaacaatagattaaggaattaaatttaagacctgaaactctgaaattattagaagaaaacatagtgtaagcatttcatgacatcaatttgggcaagaatttgttagacaagacctcaaaatcatgagtaacaaaagcaaaaataaagaaattggattacatcaaactagaaagcttctgcacagcaaaggaaacaatcaacagagtgaagagacaacctatagaatgggagaaaatatttgcagattatacatctgacaagggattgatatctagaatatataaggaactcaaacaactcaatagcaaaagtccaaataatcctattaaaaatgaacaaaagacctgaatagacatttctccaaaagagacctacaaatggccaacaggtatatgaaaaatgctcaacatcactaaccatcaggaaaattaaaatcaaaactacaatgagatatcacttacccctgttagaatgactattataaaaaagacaaaataacaagtgctagcaaggatgtggagacaaagaaacccttatacactgttggtgggaatataaattagttaagccattagagataatggtatagagatgcctcaaaaattaaaaatagatctatcatattttctagcaatcccactactgggtatataccaaaaagaaatgaaatcagcatgttgaagaaacatctgcatccccatgtttatgacagcattattcacaatagtcaagatataaaatcaacttaaatgcccatcaatggatgaatggataaagaaactgtgatatagatacacaatggaatactattcatccatttaaaaaagatgaaatcctgtcattttcaacaacgtggatgagcctggaggacattatgttaagtgaaataagccaggcagagaaagacaaatactccatgatctcagtcctatgtacaatctttaaaatttgatctcatagtagttgagattagtgattctaggaagataagggggaagtgggagatggggagagattggtcaatgggtacaatgttacaggtagatagaaggaataagttctggtactctattgcacagtagggtgacaatagccaacaataatatattgtatatttcaaatagaagagaggattttgaatggtctcacaacaaagaaatgacaaacatttaaggtgatggatatgataattaccctgatttgaataattacacaatgtatacatgtattgaaacatcacattgtacccataaatttgtagaattatttatgtgtcaataaaaagtaatacagttaaaaaaataaaattgcccattaggataaataaaaagacccacacacaaaattatcattgtggcatttcagagcacagagagaagatacttaaagcttcttctgagaggaacaggacgcatacaaaagaatgggaattagactggcgatataattaagcaatattgtaaaagatctaagggaaaaattatttggaacctagaatttttagtcaaactatgaatcaattttgggggaagaaaaaagacattttcatatatagagggccttaatagtcactgaatgtgtactatagtaaaaccagaaactacataaaagaggaatttgggagattcagcaacccaagagaataatgaagtatgagggggatgttttctccttagttcttttccgtatttttcaataatttgataataaacatgcataattttataattaaaaaggaaattaattttgacaacatgcaagttcctgttctcacataccttatagtggagggacagattgtagtcaaataagcataataatacatgcaaaattacaaactgagcattactctgaaggaaaattacataattctatgtaagcctataatacaggaatctgacctagactggggaatcagagaaggcttccctaagcaagtaccccttgaacttagctttgaaactgggaaaatgaggcaatgtgagatgaagctgttagaggtattaggaatcaaacctattggggccttctagtccttagtagagagtctggactttattctatgtggaatgacagcctccagtgggttttaggctggcggatactacaatcagatctggaatgcagaaatagtacaccagtttctttgtgggtaaaagtcttagaggggagaatatgaccaactgtagggagacctgtaaaaaaagtttatcagtagctcagacgagataatggtaacttggattaagatagtggtagtagtaacagtgaaaaactagatacatttgaaagcttttagagccaaaataggaggcagctgtgcccttgttgttaccagtgtgggatctgaacacatgactacttgggttcaaatactgagcaaattaattaacctctctgggcatccgtttcctctcctgcaagacatggatgataatggtttctacattcatagggttgttatgaggaatgaatgaattaaaacttgtaaaatactttggacagtgcttgacataaaacaagtgctcaatacatattagctattattgattatattgccctggtcagtgtcaaactgcatatgggagatgagaatggtaacaaggataactctcacttgcatattcaaatgcaggatgctgccattcactgttataaaaaactctggaagagaatgaagtgatgaaaattgtaaatttggttttgaacatgtgggttttttgagatatctaggtggagatgttgagaaagtgattggctgtatgagcctggagttccagaagaggtcagcaggggagacagaagaaggagcagtctgagaagtaggagaaaaaaacccacagagatgttggcacagaggccaagggaagagagagttttaaaaacgaatgaatggtcaacaggtgcaaataaagactgaaaaatgtccattggatttagcagcatgatggtgattggtgaccttggcaagagctgttggtttgatagtagcccaatgttcttgataaatttgtttacaagtcaaggtagcaataaagtgtctaaagtcaatttgtccattctgtcctagcaagtgttttccatttcagattctctacttcatagccataggtgtcttattcctactttacaggtctgattggatgccacaggaaatcagtctattggcatgtgattggaatgggcaccactcctgaagtgcactcaatattcctcgaaggtcacacatttcttgtgaggaaccatcgccaggcgtccttggaaatctcgccaataactttccttactgctcaaacactcttgatggaccttggacagtttctactgttttgtcatatctcttcccaccaacatggtaatatcttggatctttaaaatgaatattataaatatccagtcctacttttaataaaatttactggacaatgtacaggaatatagtgtgttgctgaaggggacattatagagttactgtattagacctcagccaagatcccctagtttccagcttccagtgtaaagtttttaccttgactataaaagggcttgagtattagtaggactcatggatttttagttaaatgtctgtgatggagaaaagatggcttatggatgattgaggtgggaaaatgaggagaatagtatgcccttggtttctcagccttatcccattaattacgctccaatattatggagagaggaactgcaagttgtagctgaagagattttttttttttttggagaaatctagggaaatgggaaaaaaaggcattgtccagattgcaactgtaagggctccactatatcattagtaatgcccagagcagtaaatagcaaatatgacaggctattgtagagcttgacttcagacaccagacagccagaggcactctgtagatacctggcagtagatgagagacacctgtgaaactgagggcaggtcaggagctagtgaattttagaagtaacatgggattgaaaggactatttggtgggaactttggaaagggtcaaaggttctgtgtaagcaaattaggacgatggtaactacagttttaaattattgttaatgtaactttatttgtaactgctagttgtgcaaattcagattgcatcatcatttcaccccaattttccttacttttgtatttattctgctaactcttaatcttggatcaacctaataaccctctttctctacccctctcgtggccattgaaggctcttagtcagtttgtgctgcaataacagtataccacagaatgggtaatttataatggacagaaatttattggctcacatttctgggggctgggaggtccaatatcaagttgcctttttctgcgtcttaacatggtggaaggcattatatgacaaaagggcaaagaaagggtgagagagagcaagaggagggtgagctcactcctgtgataacaaatccactcccatgaacactttccccagataactgcattagtccattcatgagggtggaacgcttatgacctaaacaccttttatatgttcacctctcaataccatcacgatgataattaaatttcaatatgagtttcggaggggacagacattcaaaccatagcaagagttattggagaaaaatgtcggagaggcctaatcttttatatttaatagcatttctttcttcctattactctcatattaaccttctcctcaggttccttggttgacttagaaaagagaattgatcttgccatgcatccaccattttcctccttatgttctattagtgaccttgtttattgtcttctgtagtgattaagaatagaaatctctcttccccatgtgtcacataatatttatggaattttgacaagaccttagtggacaaaatgtgtcatactgaatgagtaacaggaagttgatgcacaaacaacattcttgcaggcacagaggaataggtcatttacttgtatatgatcattgtcaatcaatcattgtccagttggaccccgattcagtttattttttgttttgtttttctccttttcacagattctatccactaattttaatctttatttttcagaaaaaaatgctttatcttattgaacctcagaccaaacactttgtttttcgatgcagactgagttatgtttaaggctacatgaaccccagactagttgtttgctgctcctaaaaccttccctgttcctcataatcaagtaaacaggtctcccttcttagaagtatttgatcttcaaaattgccctgtggtataaatagggcaggaattattattatccattttacaaagcatgaagatgagactgagaatgttgaatacatttgccatagggtttacaactagtcacaggcagacatgctcttaaaatatatatctccttgattttaagttgtatcttgtcatggttttatgaacttggaacatgtcttaaagtttatatctacactaacatttttcccaataagctgttattaaatcaatgatttgtggcaagaagggatagtgatgtggaaagggggggtacttaggggagagcctggaaggcctaataagagagaaagaagtcataaaagttaaggcaagtgatatggtttggatatttatcttcactgaaatctcatgttgaattgtaatttccaatgctggaggtggggtctggtggcagatgtttggatcatgggggtgaatccctcatggcttgatgctgtcttcatgatatttggtcattcagaagtgtgtggcaacttgcactctctgtcttgctcctgctttcaccatgtgacatgtctcctcccccttcacctacccccatgattgtaagcttcctgagacctccctgaagccaagcagatgccagcaccatgcttcccatatagcctgcagaaacatgagccaattcaatctcttttctttataaattacctagtctctggtatagaacagcctaatatagcaagacactctgacattgtttggtttgtctgactccagatggcatggaagcttatgtcaaagtagacagctgtccagaggaaccccaactacgaatgaaaaataatgaagaagcggaagactatgatgatgatcttactgattctgaaatggatgtggtcaggtttgatgatgacaactctccttcctttatccaaattcgctcagttgccaagaagcatcctaaaacttgggtacattacattgctgctgaagaggaggactgggactatgctcccttagtcctcgcccccgatgacaggtaagcactttttgactattggtactctctcttccccatactcaaaaagttcttaccagttattcaaaccaacaaatcctgaagccatgtttaaggttaggtacaggtatggaatcaaatggcaagggtattaacatttggaaactaacatagctgagcatcagagaagcttgtatttttctcactccttgccttgattgaatcatataagctgttttagagttggatttgagcctacctagaatttttcttcccaacctctcatctttttttctcttatacagaagttataaaagtcaatatttgaacaatggccctcagcggattggtaggaagtacaaaaaagtccgatttatggcatacacagatgaaacctttaagactcgtgaagctattcagcatgaatcaggaatcttgggacctttactttatggggaagttggagacacactgttggtaagttgaagaaaagatttaaggtcaggtaagaagaaaaagtctggagagttttgagtttctaaaatacctcataattcagccttgtctccaatggacatgatcttttaaaagctataaatgttacacaaataatagctgattgtatgtatttaaagtttgagtatatagaataaaaatttaatgtcacccactaaactcgacactcctttgaaatactgcttagactttgatacatatccttccagatctttctccattaattatgtcatataggagtcagcagactatggcctgtgaaccaaatttggcttgtggcctgcttttgaacagtccatgagcttagatgagattttacatttttaaaatattgcaaagaaaagaaaggaggatgggaggaaggggaggagaaggcggaggagcaagagaatatgtgacagaggctagatagggctcacaaattttagagtacttactatccagccttttccaaaaaatgcttgcttgctcctgatctaggatattaagaatgagtatggtgtaagtaacagaatactcaatggacagtggtttaaataaataagggtttattttcttcacaagaaatttgaagattggtcgttggttccataaattcagccgctgaagaatgtcatgaagaacactggtttttagatatggagttttgttagatactgccaaactgactttcagcaattttgtaccaatttatatcccctaccataagtatatgactgcccttttccccacaccattgccaacaacatatattataaaccttcagaaaattttccaatttgatgagcaaaatgtttatatgttgtcttcatttgcatttccctggttagtggtcaaattgtatattgtttcatgtttgttggctatttgtataactccctctgtgaattgcctgcttgtaaattttgtccagttttctatttggtcagtcatcttttgcttatgtatttgtaaaaggtctttatagattatggatattgacacattgttatttatctttcaaatgttttcctcacattgtcacttgtactttaactcctttatgatattttttgtccttcaaagatttttcatctttatatagtcaaaacctcctatcttttatcaatcttttcatttatatgtctctggatctttttcacttatgttttctgcctgagaatgtctttgccacccccaagacactacaaaaatagtctatattttattctcttacttgtatagctttatttttacagtgagcaatctaattgccctggaagttacttttgaatgtagtgcataattcaaatagaaattttcccaaatggcagctgacacaaccaatccttttttcattaatttgaaaatgtcttctttatcatatactaaattgctaaaatctgggatttttaattctccttaactaatctgttaccaccctgttttaatgacttcaactttgtgatatgtttgatatctgtatgacatcttctttcattgtacttcttcaaaatttttattagctattattgtacaatttttcttcataaattttgtgtacgtattttttctatttttcattttttgaagattgtataattttattttttattcattaatttttaaaatgcataatgacacaataattttacatatttatagggtactttttgtgtattttgagttacttttactggctaatttaaaaatagataaacaagagcatgcaataaaatgtaaattttcctccctcttggacttccaaccccatagtctgacagacagtcattgctgtgggtttgtatactcccctccagaagtagtgcatacatgtacaaatgtgtgtgtgtatgtgtgtgtgtgtgtgcatttcacacaaaaacaagagcagtgtaaattggtctgtaccttgatttttaaaaggtaacaatatattttgaattagccaggcatggtggcacatgcctgtagtcccagctactctggaggctgaggcaggagaatcgctcgaatctgggaggcggaggttgcagtgagctgagatcgcaccactgcactccaccctgggcaacagagtgagactctgtctcaaaaaaaaaaaaagtaacaatatattttggatatcatttcatgtcaacatatatagatctaccccattctttgatttattcaggttatactctggataccatgctgaatcctacacttaaacattacctcaaaatggatcaaagataaaatgtaagagctaaaactacaaaattataagaaaacaacaggataaatctttgtgatcttgaattagacaatagtttattggataggacaccaaaaccaacaagcaacaaaagaaaaaccatttgacccagccatcccattactaggtatatacccaaaggaatataaatcatgctgctataaagacacatgcacacgtatgtttattgcggcactactcacaatagcaaagacttggaaccaacccaaatatccaacaatgatagactgattaagaaaatgtggcacatatacaccatggaatactatgcagccataaaaaatgtccccgtttgcagatgacatgattgtatatctagaaaacaccattgtctcagcccaaaatctccttaagctgataagcaacttcagcaaagtctcaggatacaaaatcaatgtgcaaaaatcacaaacattcttatacaccaataacagacagagagccaaatcatgagtgaactcccattcacaattgcttcaaagagaataaaatacctaggaatccaacttacaagggatatgaaggacctcttcaaggagacctacaaaccactgctcaacgaaataaaagaggacacaaacaaatggaagaacattccatgctcatggataggaagaatgactgggttttaagacaagagcagaagtggaagttgcatttttatcctcatatcacacacctcagatctggaggtgggattgatattttcagggttcttcgctgcagcttccatgttattgctcttccattctctctctctctctctctctctctctcgtctctgtctctctctctctctcttgagatagggtctcattctgtcacccaggctggagtgctgtggtgtgatcacagctcactactgcagcctcaacttcctgggctgaagtgatcctcccacctcagcctcccaagtagctggtactataggcatgcaccaccacgcctagctaatttttttattttttgtagagatgaggtctcactgtgttacccaggctggtcttgaagtcctgggctcaaacgatcctcctgcctcagcctcccaaagtgctggcatgagccactgcacctaggcctttgttttcttttaaagctggtgcaatcaggcaataccacctgctacccttgcttaatactgtaatcaactgtcctcttggtcatgcctgctcatgcactgaagattttatctcctgaaacactgtctctttctctattatcagtgaatttaatgcccaaatagtaataaaggctgagaggaagcagtgtcctcaccaggcatctaaatttcaattagtgtgagaaggtgcagagaatacttcctgaagcaattgaaacaatttttaaagaagtggaaaggggcctttagagagaaacctaagtactgtcagccctctacattgtcaactgaagaatcctaagtttgtaaatttggagtggaaagggttgcaggctgggaagtgtagcctctggcagcaaatggaagcaagcactttgaagaaggaaggatgagataagaatttatgctgaatgagttggctaagtatacatatttaacaggttccaggaggagctgtgaatatttatgatggggcacctgcaaccacacatgttacatacattccatgttcactttggggtggagacttaacatttagatgcatgaaaattaggctgtatatgtcaaaagatgaaacagaggacacagaggcagcctctgtaaactggccagagccagtccatggtcagtggtctctcatcaggaagcaatgcttctcggttgttatgataaaactgcacaaagggaggggaatccaccacgtctttagaaaggactggtttatgtttaacccttaagaaagaaagtctaacggcagattagggagggagggaatgtaacaaggcatgcccgatctcccatcccatcatggtcagaaactcagtttttaagccatctctggggtctccttggccgagaaaggggtctcttcagtcgtttggggatgcttaagattttatttttatttttcagtatcactggatttctagtctcatattcaaacaaccattgattgaaagtattcaaaaaacaaccccaaaacaataaaagataataatacaacaataaacaataatacaaagaaacaatacggtaaaacaactatttacatagcatttatgttatattatgtactgtaagaaatctagagacgagttaaagtacatgagaggatgtgcatatgttatatgcaaatactacatcattttgagtaagagacttgagcatcacagattgtggtatctgcaggggtcctggaaccaatcctccatgcatgccaaggaacaatttcatgaaaagaccaaatattttgagttttatctagcctcaaattactataatgtagatagaggccacttttatttatctggagttagaccacagttttcttgttgatcctagtcgttttaggatttgatcttagatctcgcttatactttcagattatatttaagaatcaagcaagcagaccatataacatctaccctcacggaatcactgatgtccgtcctttgtattcaaggagattaccaaaaggtaaatattccctcgatttatagctcttttttacctgtagatacagatgagataaatatcatcaataacaactaaaattatgttggtcctttctccagctgttggccggacctcaagctccagtctaaagttataaaaatcaattataggaatcctcaggtgatgtttcatgtaaattcgtgaagagtcgcctgacatgtttttcctattacctagcggtgatgttcaaatattccacagccaattagattccactgcaattggttccactgcaactactgtaaatgccctaaaatcttgaagctggttcttctggcacttaagataatttttttttctgagtacggttttcagctacattccacacttttggtatctagtgtggtattccacactttgggtaactagtttgatattttcaggattctttgctgcagcttccatgttattgctcttccttgctctctctctctctctctctcaacagggtttcactctcacttttggtatctagtttgatattttcagggttcttcgcatattcatttctaaatagttcacaactccagtttttatttactatattgtttgctgtttaaagatttattttttcttttagtagattggatgttatgtatattctttctattatttaattttggatgaatatttatcaaaataatagatgtgtatgcttaaaactacaaaagggctgcctccctagaggcatccatttttaagaatttctgtttttgatttttggtggttatctctacatctctaaaaagttacttatactgctaactctttgtttttcaactttagacattatatacttactttgttttgtgcttttttccattcaagttgtttcagttttatcagtgttttcagttggattggctatcattagaactttaaaaatatactaaacatcaacttttagtaagatattttccaatcatggattgaaaatatcttttgactccatacttcataaattaaggatattaaaaactgtacccctcacttttcctttccccaaacctttcttttctctactgctgctagccattcctttacttttacaaaactaaacttgataacatttacattttgtgctgtaatttgaaataactcttccttgctttgtctatatattttctctaaagcttaaaaaattaaaaaacagcatttgtattattttagtattttagcaagtttcttttcataaatgttaactgcagaactgggtaatatgctatgattgctctcttttctacagctcaagtgattttactattaagataaaataatatgtggaaggaaaaaagttgatctcatagaagtagagataaaatagtggttactagaggctaaagaggggaaggggagggggaaatagggagacgttggttaatggatgcaaaattccagctagataggaggcataagtcctaatgttctatagcactgtagggtgactgtagtcaacaatgacatctattttcaaatagctagatgagaggatttggaatgttcccaacacaaaggtgtatcctgaagtaagactttgttttcttttattcggaaaagaaatgtaggcttcttcaaccctatttcttaggcctttcagcttcttaatcattctatgtattgcttgctatccaaatcttttattttttttttgagacagcgtctcgctctgtcacccaggctggagtacagtggcacgatcttggctcactgcaacctctgcctcccaggctcaggctatcctcccacttcagcctcctgagtagttgggaccacagacgcacactaccatgcccagctaattttttttattatttttattttttgtagaaatggggtgttaacttgttgcccagactggtgtcgaactcctgagctcaagcgatctgcctgcctcagcctcccaaagtgctggaaccaaatctttttcttcttaaagacattcttgtagtgaatagcattaactacttttcccttgtacatttctattttttgatttcttcttttgtttttctggaagtatattctcaagtaacttctaaatatgtggtacatagagggtgaactttctgaatccttcagtatcacatgatgggcagacagactggttataaaaattttcccgctgggtgcggtggctcacgcctgtaatcccagcactttgggaggccgaggcgggcagatcacttgaggtcaggagttcaagaccagcttggccaacatggtgaaaacccatctctactaaaaatacaaaaaaaatagccgggcattgtggcgtgtgcctgtaatcccagctactcaggaggctgaggcaggagaattgcttgaaactgggaggtgaaggttgcagtgagccaagatcaccccactgcactccagcctgggcaacagagcaagactgcatctcaaaaaaaattccttcccctgttttctaatattcattattgccgataagaattctttatttgcatttctttatggaagaatggcatagtgacagagttctggggagattttgaatgtgtgtcccgaaatttggaggcatacgtggatagttactggtaacctgcttttccatggagaattttgaaggctgtaatgcccataatagtgggcaagaagagagggcaagagtggagcagtttaccttcctgctgtttgacatgagtttattctgtaacaagtgaatactgttgaaagtagctgggctttatcccttttgaagatattctacccaagaaggcagttaggcaggctgaggggatagcagaaccaatagagtcttggatatatcactggaagtaagaagagctgatggggagaggagagttgcagaaggatagctgaaagaaacatctctcatgtcatggaactatgtaatgctgaggtccccatggtaactctaaagaaaccatacatgtgtcctatgaaaagaccagcatttgggcacctcccacacagagaacattgatgaccaaatagtgttgtcaaagatagagcagcaggacctgttaaacaagagtctgtttgccctttcttctattacctaccctccctcacccccagctcctggaaaagggaagagaaggctcagaaatattgaaagaacatactacaccattccctttctttctttctttcttttttttttttttttggagacagagtctcgctctatcccccaggctggagtgcattggcatgatatcggctcaacctctgcctcccaggttcaagcaattctcatgcctcagcctcccaagtagctgggattacaagtgcctgccaccacacctggctaatttttgtatttttagtagagatggcgtttcaccatgttgaccaggctggtctcgaactcctcacctcaacaccattccctttctatggatcctctaaccataggtcaggcataacttactgaggtgaggaagagcttagaatgaatataaaattaaaattttgatttagattgtatcttcaggtatgaaacatacccagaatgagacttaattactaaaatcagttcttgtcctgaggacccattaccctgagggcagatctcagttcttgctccctttcctcacagaagtcagagactacaccttaaaactccaatgccaagctctttggcatatattcaggcctgacactttcacagtcaaccggataatcaattacagctttttactttttaaaaaaattgtttgaatcttaaaattataataggtgcgactttagcttccacttgctcagaaacttcatatgtacatacagatttgtagaacccttgcaacaacaacatgattatcaatatgtggcttgttgtactctaattgagctatttatggttttgcttgtgggtaggtgtaaaacatttgaaggattttccaattctgccaggagaaatattcaaatataaatggacagtgactgtagaagatgggccaactaaatcagatcctcggtgcctgacccgctattactctagtttcgttaatatggagagagatctagcttcaggactcattggccctctcctcatctgctacaaagaatctgtagatcaaagaggaaaccaggtgagttcttgcctttccaagtgctgggtttcattctcagtgtatgtccccttataacctgaagaaaatataatggtttgcaatataggtcagtaaaagaaatgagcttagcttttactaaatttgagtttcacgtagtaaacgtgcctgctggatggataggccatagaatgtaggccctagatttttcctatagtactcattcccagtctgggatttagctctctctagctgatcctccccatttttatatgtccaattaccacctattttcagatgacccacagatttatatctacagcctagatttcttccatggacatctcattatgggtgactcaaaagtacctcaaaattaacatgtctgcagcatgtagcactgttgcaggaagtcagggaccccgaacagagggactggctgaagccacggcagaagaacataaattgtgaagatttcgtggacatttattagttccccaaattaatacttttataatttcttacgcctgtctttactgcgatctctgaacataaattgtgaagatttcatggacatttatcacttccccaaccaatactcttataatttcctatgcctgtctttactttaatctcttaatcctgtcatcttcataagctgaggatgtatgttgcctcaagaccctgtgatgattgcgttatctgcacaaattgtttgtaaagcttgtgtgtttgaacaatatgaaatctgggcaccttgaaaagaacaggataacagcgatttccagggaacaagggagataaccataaagtctgactgcctgcagggccaggcagaacagagtcatatttctcttcttgcaaaagcgaataggagaaatatcactgaattctttttctcagcaaggaacagccctgggaaaagaatgcattcccagggggaggcctctaaaatggccgctctgggagtgtttatcttatgcagttgaagataagggataaaatatgccctggtctcctgcagtgcccccaggcttgctaggattaggaaattccagcctggtgaattctagtcagaccagttctctgctcttgaaccctgtttcctgttaagatgtttatcaatgacaatgcatgcacagcaggacatggaacctcattagtaattctaatttcgccctaccttgtgatcttgctctgtccctatttgccttgtgatattttattgcctttgaatcatgtgatctttgtgacccacaccctattcgtacactccctcccctttgaaaatcactaataaaaacttgctggttttgcggcttgggggcatcacagaacctgccgacatgtgatgtcacccctggagacccagctgtaaaatttctctcttttgtactctttctctttatttcccagaccggccgacacttaggtaaaatagaaaagaacctatgttgaaatattgggggctagttcccacaatatagcacagtgcatctcacttagtaagagcttaataggctacgtgcggtggctcacgcctgtaatctcagcactttgggaggccgagacaggaggattgcttgagctcaggatttcaagaccatcctgggcaaaatagtaagaccttgtctacaaaaaaaaaaaaaaaaaaaaaaaattagctgggcatggtggtgtgtgcctgtagtcccacctactcaggaggctgaggtgggaagatagcttgagcccaggaggtcgaggctgcagtgagcctggatgacaaagcgacaccctgtctcaaaaaaaaaaaaaaaaaaaaaaaaaaaagcttaataaatacttttgggcaaaacatagggaaagatataaaatatttcaaaatatggctagaatttggaccatttctactgctttaaaaaataaagctaaattctctgaacaagaaaagcttagttcttcacaaaaactcattgctcggccccagaataactcagtgccatattgctgaggcttgactacatgtccatttgattatatttatgatacataagatccctactagtctgaaaacatttcatatgtttagagagtaaagtatatgaactttggtgccaataaaacacatggcacataaactcagagaagtataaattttgccaagtacttgtcctgaccgatttttcctaactatagttttttcgtcacttttgggaagagaactgaaatattattctatattctccaatctcctctcttcagtattttggtttatatagctataggttataaaaaatgaggtttatacatattagtgaggtttacatatgaaatcttagcagatccaattagcaagcgactaattcataaatctggttcatatacaaaatgctcttctgaaaaaaatttgaatgttttaaacagaaaatttaaggtattagtgttgtttgacatttttgtggttcaccttatctttcttatttgatttctgtttttctatttttaattttttatagccttgtggaaggtcagttgctagatggaagtttaggaaagtcagtatctcatttgacttaactaacttaagaaaggcactgaataaccacttggttctttaaggagttaaatcttctaatctgaacatgaagagaataaggctacagactgtaccaaataaatcagctagcatatggccttgggtgcagaaaaaactaagttcagtgggatcagtcaccctcttgtcctggggacacatttgttgtaagcatatactcactgctcatagcacccaccctcaactcccaagccctggtacatgcctaagaggaaatggaattaaaccaatggattagatatatcacatgcatgccatcgctttcatcatagactgctagctcctacctgacaacatcagtagcatttctttacccctttcaatatatgtaattaacagataatgtcagacaagaggaatgtcatcctgttttctgtatttgatgagaaccgaagctggtacctcacagagaatatacaacgctttctccccaatccagctggagtgcagcttgaggatccagagttccaagcctccaacatcatgcacagtgagtaaagcagcacttaagtccagtgggtggtgaataaagaaaaattgatgtaatcaaagtgatgtccagataatgaatgaattgtatgtgcacataaatttaacaattatgttacctataaatgtataatttttactcaaacacacgtgatcatataacccatattttaaaaatccagtcaccattttttcctttcaatatttacttgatttccctctcccttttaattccctatctccttctatattacatcttttcaccaaccattccatgcccaggtaacatattttaagacatattttctctataattatataatcatatataaacacatacatacattgtattagtcttctagtgctgccataacaaagtactgcagactgggtggcttaaccagcagatatctattgtcttacaactctggaggcttgagatcaggatgtgggcaacgttggtttcttctgaggcttctctccttgtcttgtagatggctttctcccttgtcttcacatggtttctcctttatatatctttgtcctaatctcctcttctaataaagataccagtattgttgggctagggcccaccgtaatgaccttattttaactaactacctatttaaaaacactatctccaggtatagtcacatgctgaggtactggggtttaggactgcaaggtataaatttgggatgggggaacacaattcagcccattgcatacatacacatgtgtatatatttatatataccacaaatctgaatggtcaaaaatatggtaaaaaattccaattgcactatcctacagggaaatgcgaaatagaataacaataggatagcactttatacccatcaaactgccaaaattataattactagtgggcttgtggataaaagagtgttctcatgctatattagtggataagtagtatagtcttttcaaaaccaatatatgccttttgaaattctgattattaagatgtttaagatggagtgagccacatttccctgtgtgtcccactggatgcaactaaaaatcctgaacaggccgggcacagtggctcacgcctgtaatcccagcactttgggaggccgaggcaggcggatcacgaggtcaggagatcgagaccatcctggctaacatagtgaaaccccgtctctactaaaaatacaaaaaattagccgggcatggtggcggccgcctgtagtcccagctactcaggaggctgaggcaggagaatggcgtgaacccggaaggcggagactgcagtgagccaagatcgtgccactgcactccaggccggcgacagagtgagactccgtttcaaaaaaaaaaaaaaaaaatcctgaacgaaatgcatgggaaccttgaaaagttataatgtgagttatactcacctaccagaatgtggcatatgttacaattctatgcccctcctctcaaagctttagccctttaactttgggttgagcctcatatttagcttgaatttctagtaatagtgatatattattctccagagttaaagtcctttactatccattattctaaaaattttaaggttgtttagtcctttgagttgcatttttattttttacatagttcagggtattgctttccttctgaaggattcagatttcacatttgtgcaagagtctaatgcttagtatttaattctagtggcacagagctttttcttttctccctcttctctccagcctcatggctttggtttagaattccttcagcctgatagaatattgtattttataatttccttattgtgctatttactagatatttgttcttctatttttttctattcataatttctccctttcccaccacatctttttccaagtaggatgtgcacttgccacagtatctggacagttaaactgtctcattttcttggagacggtgatgaaaactagagagatatagtgacataagcagagccagaaaacaatttcactgaagatgatatatattttttttcctctgggatttctaatatagcttttggtggagataagagtctggaattgagaaagaagagattggaattgagaaaaagagtctgagaaagcacagggagagacacaaaggcagagaccaagagacacaggggaaggatcttcagaggaagagtccagggagaaagatgctaagacagagggataagaaaagaagaaaaaaaaggaccaggaggagagagacccaaaccataaatcactcctatttccattagcagtaaaattgataatctattttcatacaatgaaataccatgtgacaatgaagattcacaaaaataaagctatacacaacaatatgaataagtatcacaaagacaatttttagtaaaatggtaagtgtcaaaagaatatatacagtattatattatttacataaagttcaaaaatgggcaaaattaacttatatagtttagggatacagaggaagaaaagtataaaggttagtaaggacatgattataataaaagacaagatagtggctacctcttagaaagagttcatttgagaataaacacatgtgttttgtggggatagcagcaatattgtatttcatgacctagatgtttgttttataattttgtgttttaaaaaattgtaggatttatgatttatttcgtagatggatcctacaaatgatagggaaattgcagtaggaatgaagaggaaggaacatgtacaggatttgtttagaagatagaaggcacatgattttgtaaataattagctatgtttggtaaaggactaagaggattcaaagatgattaccaaatttctgatatgggtaactagaagaagagtgagacaaaatggaagaaagtgtatttaaagaaatgatagcaaaaactttccaaatctggagaaagatgtaaatatccacgtacaagaagctcaaagatctctagtcagattagattcaaacaagactatatgaagacacgttacaatcaaactgtcaaatatcaaagacaaagagagaatcctgaaagcaacaacaaaaaagaagcaaaccacatacaaggaaattccaataaggcagaaactttacaggtcagaagagggtgggatgatatattccgagtactgggaaaactttacctagaaaatgtttccttcagaaatgcagagagataaagactttgccacacaattccagttagacaagagaaataaattaaagacatctattgtacactatggtgactacagttaataaattacccattccaatatatacatatataaacattgtgatgtacatcataatatattctatttttccctgtcaattaaaaaataaatttaaaaagattggatagagaagaatcagccattctagtaattaagcctgaggaagcttacattccagtgatttcagataaccattatgcaagttaaggaataaactggataggatgatattaaaaaaacaaaaccaccaatgagatacaccagaatggctaaaattaaaaaggctgtccataccaagtattggtaaagatgtagagtaatgagaactctcataaatttctggtcaggaaatccaaacatcgaaagccaaacatcggcataccctattgactcaggaaatccactcctagtatacacctgttatgtcctgaatcatgtcccctagaattaatatgctgaagccctaacactagtatttcagaatgtgactgtatttggagatagggtctttaaggggtttattaagttaaaatgaggttgttacaatgggccctaatccaatatgactagtgtccttataagaagaggaaatgtgggccaggcacagtggctcacgcctgtaatcccagcattttgggaggccaaggcgggcggatcacgaggtcaagagatcgagaccatcctggccaacatggtgaaaccccatctctactgaaaatacaaaaattagctggacatggtggcgagctcctgtagtcccagctactcgggagactgaggcagaagattgcttgaacccaggaggtggaggttgcagtgagcagagatcacgccactgcactccagactggcagacagaccgagactccatttgaaaaaaaaaaagaagaggaaatgtgtacacacagagacaccagggatgcatattcacagaggaaagaccaagccaaggagaggtgtcagtaaaaaccaaacctgccaataccttgatcttggaattttagtgttcaaaactgtgagaaaacacattcctgttatttacacctcccagtctgtggtatattgttatggcaaccctagccactagtacagcacccaaaagtagtgtgtacatatttcacaaaagacatgtaactatttaatccatgtggagtgtcaaaaggcaaaaatacaacaaatgtattttaaagattgtaattggcttttatacatgattctagaatcagatagccctcagaaccaaatacagaacagcagccagcaacatagtatggatagaaattggaagtgaggtttagagacagcttaattgattacagttgggcatttttgccttatttgaagctgttagtcgcctgcaattgatggaagttcagctgctataatcggctgagactgagctgtttgttataaaagcatattcctaaattaggctttcagttagttcatcaactaagccaggctgcaactttgttgtgcaaggactcaagtgcaaaggtacccttaggcaaaattcagattaatttaaaaggactttacttttgttagttatgtgaaatgaagtggaatctattttttccaagtggatagtcatattttctattatcatttaccaactagctgatttttttcctgtactggttggagatgctgcctttattatatattaagtttcaacttattatatattaagtttccgcttacatcttgtcagtttctggactccatattttgtttgatatatttatctattctgcattaagactgcatttttaattataatagctttataatatctcaatgttgtataggaaaaaaacttcaattattaattagttatactaagccaatgtctaagtattgcttagtggtttgtgggcaaccatcttacacagtacctagtaacagagtagacaagtgtttattgaatggatggatgaatggatgtgtggaagaggctttcagaaacaattcccttcatagactaaggccaatgttacttttgcttagctctttagtttgaaataatttaaaatgtacagaaaagttacaagaataatacatggaacttgcacacaccctttacccagattcacaaatgtttaacattttgcaattttgtttttcattttcttttctttatatacacacttctgttacttattttctatttgaaaattagttgcagacatcacatccctttacctctcaatactttagtacacatttcctgtgaataaagatatcttttacataacagacacttcaaattgataaagcacatttccataatttacaactggtattccagttgtatcaaccaatgctgtcatttatagcattttcttctttgaagtacagggatctagtacaagtaactacttgtcctgcttctttcatttccttgaatctggaccttcatcagatggtaactttaagcacccaaaggtttttttctggtttctcctctgtgtagtttaagaccatgcaaacatcttgctactcatcaaaatgccccccatataacatccaaattaatctttatcatgatggtttatgactgtctcctcacattgggattggggcccaactgattattaacaatctacttttttggaagatataatatctcttcctgggaataagataatgggcataacatataataattcctaattgtatcatgacaatcacaatccaaaatactaaatctgtgatgtgtctaaatctcttttccccattgtttttgcaggcatcaatggctatgtttttgatagtttgcagttgtcagtttgtttgcatgaggtggcatactggtacattctaagcattggagcacagactgacttcctttctgtcttcttctctggatataccttcaaacacaaaatggtctatgaagacacactcaccctattcccattctcaggagaaactgtcttcatgtcgatggaaaacccaggttagttattatatttttcttgtaccaacagctgtgaatgcttcactagccattcgtatgctcttttgcccactagctcacatgctgtcatttatagcattttcttccttgaggtacagggatctagtttctcctctgagtagttattattttcacccttgcaactaataaacagtttgaaggatcacgtagtagttctatttttagttttttgaggaacctccttactcttttccacagtatttgtacttatttacactcccaccaacagtgtacaagcattccccttttgccacatcctcaccagcattttttaattattttgtctttttgataaaagccatttaactggagtgaaatatctcattgtgcttttggtttgcatttctctggtaattagtgatgttgagcagtttttcatatacttgttggccatttgtatgtcttctttttttttttttttttttttttttcagacggagtctcgctctgtagcccaggctggagtgcggtggcacgatctcggctcactgcaagctccgccacccgggttcacgccattctcctgcctcagcctcccgagtagctgggactacaggtgcccgccaccacacccagctaattttttgtatttttagtagagacagggtttcaccgtgttagccaggatggtctcgatttcctgacctcgtgatccacccgcctcggcctcccaaagtgctgggattacaggcgtgagccaccgtgcccagcctgaatgtcttcttttgagaaatgtctattcagatctttgtccatttttaatagggttctttgttttttttgctattgactagagtttcttatatattctggttattaatgccctctcagttgtatagtttgcaaatatttcatcccatcctataaattgtctcttcactttgttaattgtttcctttgctgtccagaagctttatggcttgatataatcccatttgtctacttttgctttagtcccctgtgcttttgaggtcttacctgcaaaatctttcccagaccaatgtcctggcgcattcccccaatgttttcttccagtagtttcatactttcaggttgtatattttagtctctaatccattttgatttgatttttgtatatagtgagagataggggtatagtttcattcttctgcatgtggatatccagttttcccacaccatttattgaagagactattctttcaccagtgcgtgttcttggcactttgtcaaaggtgagttggctataaatgtgtggatttatttctgggttttctgtcgtgttccactggcatatatttctggttttatgccagtaccgtgctgtttttgttactacagctttgtagtatagtttcaagtcaagtagtgtcatgcctccagctttgttcattttgctccagattatttagctgtttggagtcttttgtggttccacacaaattttaagattcttttttctatttctgtgaaaaacttcactggcatttggataggtattacattaaatctggtagcattgatattttaacaatattagtttttccagcccattaaaatgggatagataccttttcagttttttgtgtgttcttcaattccctttatcagtattttagttttcattatagagatatctcagctctttggtttaatttattccaatatatttatttttattatagctattgtaaatgatttttaaaaaatttctttttaggttgttagctcttggtatatagaaatgctactgatttttgcatgttggttttgtatcctgcaactttactgaatttgtttatcagttctaatagttttttgatggagtctttagttttttgtgaaatataagattatgtcatctataaacaaggagaatttgacttcttcctttccaatttgggtaccctttatttctttctcttgcttacttgttctggcttggacttccaggactacattttatagaattggtgaaagtgggcatccttatcttgtttcagatcttaaaggaaaggcttttggttttccacatttggtatgatattagccgtagtttgtcatatatggcatttattgttttgaggtaagctttctatacccagtttgtttagagttttctcatgaagggatgttgaatttaatctttttggcatcaattgaaatgatcatttgtttttgtccttcattctgttgatatgatgtatcacattgattcatttccatatgttgaaccatccttgcatccctgggatgaatcccccttgatcatgatgaatgatcttttactgtgttgttgaatttggtttgctagtagttcgttgaggatttttgcatcaatgttcatcagagatattggcctgtagtttctttttgtgtatgtgtgtgtctttgtctggtttggtttcagggtaatactggccttgtggaatcagtttggaagtatttttcccccttgatttttgggatagtttgtgaagagctggtattagttctttttttttattattatacattaagttttagggtacatgtgcacaatgtgcaggttagttacatatgtatacatgtgccatgctggtgtgctgtacccattaactcgtcatttagcattaggtatatcgcctaatgctatccctctccccttcccccaccccacaacagtccccagagtgtgatgttccccttcctgtgtccatgtgttctcattgttcaattcccacctatgagtgagaatatgcagtgtttggttttttgttcttgcgatcgtttactgagaatgatgatttccaatttcatccatgtccctacaaaggacatgaactcatcatttttatggcggcatagtattccatggtgtatatgtgccacattttcttactccagtctatcattgttggacatttgggttggttccaagtctttgctattgtgaatactgccgctataaacatacgtgtgcatgtgtctctatagcagcatgatttatagtcctttgggtatatacccagtaatgggatggctgggtcaaatggtatttctagttctagatccctgaggaatcgccacactgacttccacaatggttgaactagtttacagtcccaccaacattgtaaaagtgttcctatttctccacatcctctccagcacctgttgtttcctgactttttaatgatcgccattctaactggtgtgagatggtatctcactgtggttttgatttgcatttctctgatggccagtgatggtgagcattttttcatgtgttttttggctgcataaatgtcttcttttgtgaagtgtctgttcatgtccttcgcccactttttgatggggttgtttgtttttttcttgtaaatttgtttgagttcattgtagattctggatattagccctttgtcagatgagtaggttgcgaaaattttctcccattttgtaggttgcctgttcactctgatggtagtttcttttgctgtgcagaagctctttagtttaattagttcccatttgtcaattttggcttttgttgccattgcttttggtgttttagacatgaagtccttgcacatgcctatgtcctgaatggtattgcctaggttttcttctagggtttttatggttttaggtctaacgtttaagtctttaatccatcttgaattaattttagtataaggtgtaaggaagggttccagtttcagctttctacatatggctagccagttttcccagcaccatttattaaatagggaatcctttccccactgcttatttttctcaggcttgtcaaagatcaggtagttgtagatgcgtggcgttatttctgagggctctgttctgttccattggtctatatctctgttttggtaccagtaccatgctgttttggttactgtagccttgtagcatagtttgaagtcagggagcgtgatgcctccagctttgttcattaggcttaggattgacttggcgatgcgggctcttttttggtttcatatgaactttaaagtagttttttccaattctgtgaagaaagtcattggtagcttgatggggatggcattgaatctataaattacattgggcagtatggccattttcatgatattgattcttcctacccatgagcatggaatagtcttccatttgtttgtatcctcttttatttccttgagcagtggtttgtagttctccttgaagaggtccttcacatccgttgtaagttgtattcctaggtattttattctctttgaagcaattgtgaatgggagttcgcttatgatttggctctctgtttgcctgttattggtgtataagaatgcttgtgatttttgtacattgattttgtatcctgaggctttgctgaagttgcttatcagcttaaggagattttgggctgagacaatggggttttctagatatacaatcctgacatctgcaaacagggacaatttgacttcctcttttcctaattgaatacactttatttccttctcctgcctaattgccctggccagaacttccaacactatgttgaataggaaaggtgagagaaggcatccctgtcttgtgccagttttcaaagggaatgcttccagtttttgcccattcagtatgatattggctgtgggtttgccatagatagctcttattattttgagatacgtcccatcaataccaaatttattgagagtttttagcatgaagggttgttgaattttgtcaaaggccttttctgcatctattgagataatcatgtggtttttgtctttggttctgtttatatgctggattacatttattgatttgcatatattgaaccagccttgcatcccagggatgaagcccacttgatcatggtggataagctttttgatgtgctgctggattcggtttgccagtattttattgaggatttttgcatcaatgttcatcaaggatattggtctaaaattctcttttttggttttgtctctgcccggctttggtatcaggatgatgctggcctcataaaatgagttcaggaggattccctctttttctattgattggaatagtttcagaaggaatggtaccaattcctccttctacctctggtagaatttggctgtgaatccatctggtcctggactcttttcggttggtaagctattgattattgccacaatttcagagcctgttattggtctattcagagattcaacttcttcctggtttagtcttgggagggtgtatgtgtcgaggaatttatccatttcttctagattttctagtttatttgcgtagaggtgtttgtagtattctctgatggtagtttgtatttctgtgggattggtggtgatatcccctttatcattttttattgcatctatttgattcttctctcttttcttctttattagtcttgctagcggtctatcaattctgttgatcctttcaaaaaaccagctcctggattcattaattttttgaagggttttttgtgtctctatttccttcagttctgctctgattttagttatttcttgccttctgctagcttttgaatgtgtttgctcttgcttttctagttcttttaattgtgatgttagggtgtcaattttggatctttcctgctttctcttgtgggcatttagtgctataaatttccatctacacactgctttgaatgtgtcccagagattctggtatgttgtgtctttgttctcattggtttcaaagaacatctttatttctgccttcatttcgttatgtacccagtagtcattcaggagcaggttgttcagtttccatgtagttgagcggttttgagtgagtttcttaatcctgagttctagtttgattgcactgtggtctgagagacagtttgttataatttctgttgttttacatttgctgaggagagctttacttccaactatgtggtcaattttggaataggtgtggtgtggtgctgaaaaaaatgtatattctgttgatttggggtggagagttctgtggatgtctattaggtccgcttggtgcagagctgagttcaattcctgagtatccttgttaactttctgtctcgttgatctgtctaatgttgacagtggggtgttaaagtctcccattattattgtgtgggagtctaagtctctttgtaggtcactcaggacttgctttatgaaactgggtgctcctgtattgggtgcatatatatttaggatagttagctcttcttgttgaattgatccctttaccattatgtaatggccttctttgtctcttttgatctttgttggtttaaagtctgttctatcagagactaggattgcaacccctgcctttttttgttttccacttgcttggtagatcttcctccatccttttattttgaggctatgtgtgtttctgcacgtgagatgggtttcctgaatacagcacactgatgggtcttgactctttatccaatttgccagtctgtgtcttttaattggagcatttagtccatttacatttaaagttaatattgttatgtgtgaatttgatcttgtcattttgatgttagctggttattttgctcgttagttgattcagtttcttcctagcattgatggtctttacaatttggcatgattttgcagtggctggtactggttgctcctttccatgtttagtgcttccttcagaagctctcttaggtcaggcctggtggtgacaaaatctctcagcatttgcttgtctgtaaaggattttatttctccttcacttatgaagcttagtttggctggatatgaaattctgggttgaaaattcttttctttaagaatgttgaatgttggcccccactctcttctggcttgtagagtttctgccgaaagatcagctgttagtctgatgggcttccctttgtgggtaacccgacctttctgtctggctgtccttaacattttttccttcatttcaactttggtgaatctgacaattatatgtcttggagttgctcttctcaaggagtatctttgtggcattctctgtatttcctgaatttgaatgttggcctgccttgctagatttggcaagttctcttggataataccctgcagagtgttttccaacttggttccattctccccatcactttcaggtacaccaatcagttgtagatttggtcttttcacatagtcccgtatttcttggaggcttcgtttgtttctttttattcttttttctctaaacttatcttcacacttcattttattcatttcatcttccattgctgataccctttcttccagttgatcgcattggttactgaggcttgtgcattcatcacatagttctcgtgccgtggttttcagctccatcaggtcctttaaccacttctctgcattggttattctagttgtccattcgtctaattttttttcaaagtttataacttctttgccattggttcgaacttcttcctttagctcggagtagtttgatcttctgaagccttcctctctcaactcatcaaagtcattctccatccagctttgttccattgctggtgaggagctgcattcctttggaggaggggaggtgctctgattcttagagtttttggtttttctgctctgttttttccccatctttgtggttttatctacctttggtctttgatgatggtgacgtacagatgggttttcggtgtggatgtcctttctgtttgttagttttccttctaacagtcaggaccctcagctgcaggtctgttggagtttgctggaggtccactccagaccctgtttgcctgggtatcagcagcagaggctgcagaacagcagatattggtgaactgcaaatgctgctgcctgatcattcctctggaagttttgtctcagaggagtagctggccatgtgaggtgtcagtctgcccctactggggggtgcctcccagttaggctactcaggattcagggacccacttgaggaggcagtctgcccgttctcagatctcaagctgcgtgctgggagaaccactactctcttcaaagctgtcagacagggacatttaagtctgcagaggttattgctgtcttttgtttgtctgtgccctgcccgcagaggtggagcctacagaggcaggcaggcctccttgagctgtggggggctccacccagttcgagcttcccggccgctttgtttacctactcaagcctgagcaatggcgggcacccatcccccagccttgctgccaccttgcagtttgatctcagactgctgtgctagcaatgagcaaggctccatgggcgtaggaccctctgagccaggtgcaggatataatctcctggtgtgccgtttgttaagcccgttggaagagcgcagtattagggtgggagtgacccgattttccaggtgccatctgtcacccctttctttgactaggaaagggaattccctgaccccttgtgcttcctgggtgaggcgatgcctcgccctgcttcggctcacgcacagtgcactgcacccactgtcctgcacccactgtccggcactccccagtaagatgaacccggtacctcagttggaaatgcagaaatcacccgtcttctgcatcacttatgctgggagctgtagactggagctgttcctattcggccatcttggctcccaatgcaaagaccttcaaacaacgtgacttcattttctcactcctaccttttgtgctcttgtcatttatttgaattctacatatattttaaaccccataagacattattattgttttatataatcaatatcatttatatatatatatatatttacacctttcatttctttcattcttttctgcatttcttgcttccatctatgatcattttctttttgtctgaagaaacttctttggaacttccttcagtgtgtgttggctagtaaaaagttctctgtcagtttttggtcagaatgggtctttattttgcctagatacaagtccttggttggatttacatattgtgaatgttttctcccagtctgtggtttgtcttttcactcctttaagggtgcattatggttaatagaagttcttacatttaattaattcttatttttcagttttttatggttaatgccttttgtattctgtttcagaaatttttgcctatcctaagaacatgatgccatccttctatattttctttctacatattttaaatattttcttctagaagtctgattgctgtgttgttcacaattaagtttatgattcatttttaattaattttgatggagtgatgcagataaaagttcatttttccatatggatatttaattgctctagcaccaattgttggaaaaaaataatttcctcactgaattgcactgttgtctttgccatgaatctgatgactgtatcactgtagctttgtttctgtactctatttcaggggtaggttatgatccacaagccaaatttgcagcttgtttttatatggcattgagctaagaatttttttacatttttaaagaattgtcacacaaaacaaaaaaaaagcaaaaaaacaaataaggatatgtatcatggaccatatgtgtctacaaacctaaaatatttactatgttgctttttacagaaaaagtttgccaacccctgatctcttatattccattgacttattggtctatctttgtaccagtaacatactatcttatagtaagttttaatatttgttagtataattcctccaactttgctctctttgatttttatataaattttagaatcatcttgtcaattttatcaataaaaatatcttctgaggttttgatagggattacattgattctgcagatcaatttgggggagcatacctcttgacaatattgagtattcctgtccatgagcatggtttagttatttatttacatcttttaaattttctcttggcaatgtttttgtaaaattttagtgtacaggtcttgcacatttttgtaaagtgtattctttggtatttaatgctattataatattttttatggtatcagtttttgtcaattgtgtttttctagaaatatgtccctttcatctaagttgtttaatttacttgaagtaagttatttgtaatgttcttttatcatccttataatgtctgtactgatgtctccgttttcatacctgatattgttatttatattttatctattttaagtttatcgcctgcacccactaactcgtcatctagcattaggtatatctcccaatgatatccctcgcccctccccctagtgcacatgtaccctaaaacttaaagtataataaaaaaaaaaagtttgtcgcctttgttataggttcatcaaatttactaatcctaccataggatcaaatttttgctttgttcatcaggtcatggaattaaaaaaatttttttgttttgtttattttctatgttgaatttttatttttattttgctttgcatttcatttatttctggtcttttgttattattccaatactttctctggattcagttttctttttcttcttgacttcttgagattaaaacttggttcattgattttcaacatttcttactttttaaaagttcatacaaagcataaatttccctttatatactgctttaaccccatatcacaaattttgatgagtcatatttttattatcattgagtttaaaatattttataaattttacgttatttcttgttttattcatagttattttacagtgttttacttaatttcccaatatatggcgattttctggctctctctctgttgctgatttatttgttttactgtgatcacataacatactctatattatttcaatcatttgaaatttgttgagacttgctatatgcccagtgaataatttaatttgattaatggcccactgcatttgaaacaaatatgtctttgctgttattgggtagagtgtcatatatttgcctattatgtcaagttgctttatcatgtttttaaaatccttataaacttcctgatattttatctgtttcttacagacatggaggaaactgtgacatctctgtgattgttgagtttgttattttgatttttgtatttgttagtaagaatgtttcaaaataaatgaggcaatataaaatcaggtgcttacaactttaaggttgtattcttattaaatcaattctttcatctttgtgaaatgtcctttttgtctgaagtagtacttgttgccttaaacgtctgcattgtctaaaatttatacacctgcactatcatatttattttgcttaatgtttgtgtggtatatatttcccattcttttcttttcaacctatctctatccttatatttacagtgtgtcttttttaacattttctgtagtgcaagtctgttggttaattaattttgtcagtttttgcttctctgaaaagtctttatttctgtttttgaattatatcttcactgtgtatagaattctgggtttgtggttgttgtttttgttttattacattttgttttattggtttttccctcagcactttaaaaatgccgctccattgtttctacttgcatagtttttcacaataagtttgttgtaattcccatttgcattcaactgtacataatgtatctttttaaaaaaatctggatggcttcaagctctttactttgatttttgtgtgtgtgtgtgtgtgtgtgtgtgtgtgtgtgtgtgtgtgttactttggcattctctaggcttattcaatctgtaatttggtatcattaattttgaaaaatatttatcatctgtgtcttcaaatattgcttctaattctttctcttcttctggtattgcatttacatatattatactgttcaattttgtcacacagctcttgaatatgctgttctagtttgttttctaactatttttccttctagttgttcagttttgttgacatttattgacctatttttacttcagtaattgtttcctgggttgttgagttaattgatgaactcatagatgacatacaatttatctttttattcttgtgtcacttgtgcttttgatgtcacatctaggaaggctttgtctagcccaaggccacatttacttccatattttcttctaagagtttgatagttgtagctgttacatatatgtctatgatctagtttgaataaatttttgtgtatggtgtgaagaagaggtctaacctcttttttattttttgcatgtaaacatccagttgtcccggcaccatttgttgaaaatatgattcttttcccattaagtcatcttgacacccttgttgaaaatcaattgaccataaatgtgagagtttatttctgaactctccattctgttccattgacccatacgtcttctataaattcttatagctaattctacattagactttggtttttcagatgtggtcatctcattagattatggtgatatgtttggttacaagttttatcttctccttggcaacattttttttattactgctcttcttttattcgtttttgttgttcctttctctttttgtgagacagggtctcactctgttgcccagggtggagtaagtggtgtgatcatggctcactgcagcctcaacctcctgggctcaagcaatcctcccacctcagcctcccaagtagtgggactacaggcatgcaccatcatgccaggctaacttttttattttttgtagagacagggtcttgctttgttgcccaggctggtcttgaactccaagctcaagcaatcctccaacctcagcttcccaaagtgctgggattaccagtatgagccactgcacctggccttgttgttcctttcttccttttatcttgtagtatcttgatcctttttgcttattatttatcattgaggtgagtttgttctaaataaacttttcgcagaaagtttatgtagatatattaatatcaatgaggcattaggagtgagttttagattagcaggaattctcttatgaaaggtattgattgtatgtgtgagttttcagcctttacttctctccagcccatcaagatcaaagctgcagagttgtttacatttcagaatttctttcctcccctccccaccttgcaaaacagacttacagtgcaaaaatgacttgtcaatgtgattctttcttctggtcccatctttcctaccttttgagacttgtgttgaaaggagtccagtaaaaccaccgatgctagcttgtataccctgatcccattgttataatgaatgactgactgtttttcatatcaaagtataatacttgcaccttgatagaagaaagaaacaaggccaggcacagtggttcatgcctgtaatcccagcactttgggaggctgaagtaggaggaataattagactttgatattaaaaatggggaagatatggcggtataagatatgaggaagtatgtcttcttggacttttctgaaatctgccagccatgagcatccactctttttatcttttgatacctgttttatattaactatacttctattttgtggtttcatggcttcagatatcttccagcttaattgtactctgtctttaattatttgcagcaatttctgaaaggagcaagaagaaaggccagccctttcttcactaccttaaaaactggtcatcttttgaaaccccatgaaaggcacagtgggtgaccatctacatcaggagtgggcaaactatggcccttgggtagtctggtctctgtccgtttttgtaaggttttattggaacccatacacacacaaactgatcatctcttgttatgtgttaagttttcttataattattcttttctatttcatccagctgaattaccatttcaccttgtgtatgccctttccagtcttaaattatagaagctatgtctttgtggttttaaattatggaagctgtgccttcttgtgttttagtatggcaagatatttgttcttacttttcctctagaatctgcagtggattactttcagaagtaggtattgcctctaagtttcctgacttctgtttccttctccctgttctgtagtatatttatagattgcatgttttctcgtccttaaacaaggtacaaatatgttctgatcaaggtttgctagccgagaggataagtggcttgctcttagcctaactctctgtctacttaatggatgtcgaattcccttctcaactcaacagctagtaactagttccaagatcggataatagcttacagaattaattagttcagtgaaagccctggtttgatcacagaggcaggagactgatctatatatttgtagtgctgactagaccccaacttggccagatagcttatacctatgtcagaagttggaggaggagattgacagctgaggtgtctccaagggaattacaattattttcattttctttgtgtctgtaattatgtctcttttcttacttcaaattttgtatatgtgaaatttcttaatttttatttggttatttattttattgactttttcatcaaacaaccaactctaagttcttggattgaaatttatgaattaattataatgttttaaatttaccattagtcacacatacaatacaaaaagatattttcattacaaaattttaacccaagccattaaaactaaactccagcttggtcaccattcctaataccaggcccctctcagaggggagggtaaataaaagtccattttggtaactagtttgacgagaatctctaattgtttccctgtttttcttataatgtctgcctttgaattatcctctttttttcaagagttccatcatataatgtattcctttttgcttacagattgacctcctagaggcatgcatccccctgctccagtctgagctggttctctctaggcctgaggctcagttatcaacttgggacttttatttaccctccctcaggataggtacctggttcttggataccaggtcttactcttgtttgagatactcctttattttggtggcaaacattccataatcacttcctgataatggtgacatttgaggtagattttctgagtctttatatgttagaatatgtttttattctcctttgccacttgattgataatttggctgcacatagaatgtaagcattcacagggcttttgggagcagcttcccttgagaagaaggtggatgcagttaagatcttccctgaaaagactgtgtgaaatgacaaggctattgaggtacccaacgggtagcttggtaaaggtgtatcttgtctcttatgtttatgcatctactttaccaccatgtaattagcctattataacttgttgcattccttcactcagctaatcttgttcatggtagaaattaatattgctagtaccatggtagaattttatattagctggatcctagacctaaatgctccttccttgtgcttacatattctgcaagtgggtgacagtggatgctaggtattgtgttatgtgatttcaatgtattatatgatggggtagatactattagcctcatttgaaaattagaaacctattgttcagaaagtttaagtgactttctcaaagtcacacagctggtaaatggtagaactgggatttgaatccaggcaatctgatggatttaagaggaacctgtgccactatgtgatatagcaataacatctagccaatataaatactttcctgaattaaatcactgtcatattcagagagttctgtgtcactattaagaccctccattattgtgtatattaattacatttccctattttaatcccaatatctattcatttttatcacagtcctttcttatggtcacaaacaggcatagtacaacagcagcaatgcaaaaaccacttttatattacatgttccagggatttaacccaatgacctgtgatataatgatactgactagtattttttcatttatctgggaatgggagagaacctctaacagaacgttttagaatctgtgttatgagtaaccagagtcttattcttcctcatctccaggtctatggattctggggtgccacaactcagactttcggaacagaggcatgaccgccttactgaaggtttctagttgtgacaagaacactggtgattattacgaggacagttatgaagatatttcagcatacttgctgagtaaaaacaatgccattgaaccaagaagcttctcccagaattcaagacaccctagcactaggcaaaagcaatttaatgccaccacaattccagaaaatgacatagagaagactgacccttggtttgcacacggaacacctatgcctaaaatacaaaatgtctcctctagtgatttgttgatgctcttgcgacagagtcctactccacatgggctatccttatctgatctccaagaagccaaatatgagactttttctgatgatccatcacctggagcaatagacagtaataacagcctgtctgaaatgacacacttcaggccacagctccatcacagtggggacatggtatttacccctgagtcaggcctccaattaagattaaatgagaaactggggacaactgcagcaacagagttgaagaaacttgatttcaaagtttctagtacatcaaataatctgatttcaacaattccatcagacaatttggcagcaggtactgataatacaagttccttaggacccccaagtatgccagttcattatgatagtcaattagataccactctatttggcaaaaagtcatctccccttactgagtctggtggacctctgagcttgagtgaagaaaataatgattcaaagttgttagaatcaggtttaatgaatagccaagaaagttcatggggaaaaaatgtatcgtcaacagagagtggtaggttatttaaagggaaaagagctcatggacctgctttgttgactaaagataatgccttattcaaagttagcatctctttgttaaagacaaacaaaacttccaataattcagcaactaatagaaagactcacattgatggcccatcattattaattgagaatagtccatcagtctggcaaaatatattagaaagtgacactgagtttaaaaaagtgacacctttgattcatgacagaatgcttatggacaaaaatgctacagctttgaggctaaatcatatgtcaaataaaactacttcatcaaaaaacatggaaatggtccaacagaaaaaagagggccccattccaccagatgcacaaaatccagatatgtcgttctttaagatgctattcttgccagaatcagcaaggtggatacaaaggactcatggaaagaactctctgaactctgggcaaggccccagtccaaagcaattagtatccttaggaccagaaaaatctgtggaaggtcagaatttcttgtctgagaaaaacaaagtggtagtaggaaagggtgaatttacaaaggacgtaggactcaaagagatggtttttccaagcagcagaaacctatttcttactaacttggataatttacatgaaaataatacacacaatcaagaaaaaaaaattcaggaagaaatagaaaagaaggaaacattaatccaagagaatgtagttttgcctcagatacatacagtgactggcactaagaatttcatgaagaaccttttcttactgagcactaggcaaaatgtagaaggttcatatgagggggcatatgctccagtacttcaagattttaggtcattaaatgattcaacaaatagaacaaagaaacacacagctcatttctcaaaaaaaggggaggaagaaaacttggaaggcttgggaaatcaaaccaagcaaattgtagagaaatatgcatgcaccacaaggatatctcctaatacaagccagcagaattttgtcacgcaacgtagtaagagagctttgaaacaattcagactcccactagaagaaacagaacttgaaaaaaggataattgtggatgacacctcaacccagtggtccaaaaacatgaaacatttgaccccgagcaccctcacacagatagactacaatgagaaggagaaaggggccattactcagtctcccttatcagattgccttacgaggagtcatagcatccctcaagcaaatagatctccattacccattgcaaaggtatcatcatttccatctattagacctatatatctgaccagggtcctattccaagacaactcttctcatcttccagcagcatcttatagaaagaaagattctggggtccaagaaagcagtcatttcttacaaggagccaaaaaaaataacctttctttagccattctaaccttggagatgactggtgatcaaagagaggttggctccctggggacaagtgccacaaattcagtcacatacaagaaagttgagaacactgttctcccgaaaccagacttgcccaaaacatctggcaaagttgaattgcttccaaaagttcacatttatcagaaggacctattccctacggaaactagcaatgggtctcctggccatctggatctcgtggaagggagccttcttcagggaacagagggagcgattaagtggaatgaagcaaacagacctggaaaagttccctttctgagagtagcaacagaaagctctgcaaagactccctccaagctattggatcctcttgcttgggataaccactatggtactcagataccaaaagaagagtggaaatcccaagagaagtcaccagaaaaaacagcttttaagaaaaaggataccattttgtccctgaacgcttgtgaaagcaatcatgcaatagcagcaataaatgagggacaaaataagcccgaaatagaagtcacctgggcaaagcaaggtaggactgaaaggctgtgctctcaaaacccaccagtcttgaaacgccatcaacgggaaataactcgtactactcttcagtcagatcaagaggaaattgactatgatgataccatatcagttgaaatgaagaaggaagattttgacatttatgatgaggatgaaaatcagagcccccgcagctttcaaaagaaaacacgacactattttattgctgcagtggagaggctctgggattatgggatgagtagctccccacatgttctaagaaacaggtatgaatgcattggttattcctttgctctgctcttgtgacatttgactttaccagatgatgacaccaacaatgagagttagaggatgaaaaatcaaggtgtcttgaaactcttactctggtgagatagagagaagagaggtttacaagagggtagaggaatcagggacaagaaggagcaatggggagcaggaagaaagtcaacctcacctatcaaccttatgagctgcaggggaaatcttagtctcatcagagaactttaagcaaggcagaaggaagaagcaagttcgtgttaaagaggttaaggacttggggaggattggttttcatgatactggggatccagagggcaaagtaggatgattttatttttaggtgagtagagggaggttgagcagtcaagtagtacagagaaatgtggaatataaacataaggagagtcagtcagtcacaaatatttatggaacacctactacatgccagacacttttgtacacattggagtgcagcacagcaggagcttatattctattggaaagagcaagagacaagttagtacaaaactaaataaggcaatctcaattgtgttgttcagaagatagaatagaataatatggtagagagaataatatgatagagtaatacggtagagtgttacattagctgtggtggtcatagaaatcatctttgaggagttgagacctaaatgatgataacaggccagctgatggagctctgagagaagatgtttccagacagagggaagagaaaatgcaaaggccctgagaatggaaaaagtttaccatgtttgaggaacaagaagggacaagcatgacttgtcactttcccaccttgctttctagctcaagtaagcccttattgctgcattgcaaccatagactatttccctagtccactgactttctcattctcctggacctctatcttagattttctgtgttttccttaaatctcgagcaccttttttccattctccaatgcccattttcactcttagctgatgctgtgcaatgaacctccacagactcccaacatcacatttactggcatttgtacccatatactctgcctgcacacttattacaataaatagagtgtctgtgctcctaaggccaacctctccagttttgtacttgattcccatctcttctcccttcataaaaaatgttgctccagcaatttctccttttctcccttacatcatcaatttatctctccactagattaatctcatcaacatcaatcatgctattatttcctcccctatctttacagaaaccgtcttaaaataattgtccctgcttgcagcctttgcatcttttcctgccattctctcctctttaacccactccaaagaagcttttatctctattatttcataagaactacattttcaaggtcattattgatctttacattactgattactagccctcatcttatttgaattctcagtagtatttgagaggtgattactccatcgttgatacaggttctcacttggtttctctaacaccacttttcttcacttttctactaaacttactgccaatctttgtcaactttgcgagtccttcttcatccccctaatctttaaaggttagagtgctccagggattagttctccaacttcttctttattctatttatactcactctgtgacgacattgtttagcctcatgattttaagtactatctatctgcagataattccagttgaatatctggagatattctcagatctctctcctgaagtcaaaatttacatatcaactccctaccttaacatgcacacaattagactcttaattcctgccccttcccaaaacctgctgattgctcagccttctccatggcaatcaaaaaccattcctggccgggcatggtggctcactcctgtaaccccagcacttggggaagctgaggcaggtggattggttgagccccagagttcaagatcagcctgggcaacatggcaaaacctcatctctattaaaaatacaaaaattagccaggcgtggtggtgcacacctgcagtcccagctactcaggaggctgaggcacgagaatcgcttgaactggggagacggaggttgcagtgagctgagatggcctcactgcactccagcctgggcaacagagtcagacttgatctcaaaaaaataaataagtaaaaccattccctatttcagttattcagtcacagatcttgaagttttccaactctttttttcttacattaacatctaatctgtaaaggatcctgtattagtccattttcacactgctaataaagacatacctgagactgggcaatttacaaaagaaagaagtttaatggactcacagttccacatggctggggaggcctcacaatcatggcagaaggcagggaggagcaagttatatctcacatggatggcacaggcaaagagagagagcttgtgcagggaaactcctctttttaaaaccatcagatcttgtgagacttattcactatcatgagaacagcaagggaaggacctactgccatgattcagttacctcctatcaggtccctcccacagaacatgggaattcaagatgagatttgggtagggacacagccaaaccatatcattccaccccatcccctcccaaatctcgtgtcctcacatttcaaaaccaatcatgccttcccaacagtcccccaaagtcataacacatttcagcattaactcaaaagtccacagtccaatgtctcatctaagacaaggcaagtcccttccacctatgagcatgtaaagtcaaaagcaagttagttacttcctagatacaatggggtataggcattgggtaaatacagccattccaaatgggagaaattggccaaaacaaagggcctacaggccccatgcaagtctgaaattctacggggcagtcaaatcttaaatctctaaagtgatctcctttgactccatgtcttgcatctgagtcatgctgatgcaagaggtgggtgcccatggtcttgggcagctccacccctgtggctttgcagggtacagcctcccttgtgtctgccttcatgggctggcattttctgtagcttttccagatgctggtgcaagtttctgatggatctaccattccggggtctggaggacggtggccctcttctcacagctccactaggtggtaccccagtagggactctgtgtgggtgccctgagcccacatttcccttctgcactgccctagcagagtttctacatgaaggcccacccccgcagcaaacttctgcctgggcatccaggcacttccattaatttctaaacaacaaagcattcaagaggcgacttgggtgctattaagggcattcagtttcataagggaagcagagcataaaagtttggaaaatttgcagcctgataatgttagagaaaagcaaatcccattttctgaggagaaattcaagcaggctgcagaaatttgcataagtaatgaggagccgaatgttaatccccaagacaatggggaaaatgtctccagggcatgtcagaggtcttcacaccagcccctcccatcaccggcccagaggcctaagaggaaaaagttgtttcatgggctgggcccaggatccccatgctgtgtgcagcctagggagtcggtgccttgtgtcccagccgctacagccatggctgaaaggggtcaatgtagagctcaggctgtggcttcatagggtacaagtcccaagccttggcagcttccacatgatgttgagcctgcgagtgcacagaagtcaagaactggggtttgggaacttccgcctagatttcagaagatgtatgaaaacacctggatgcctaggcagaagtttgctgcgggggtgggccctcatggagaacctctgctagggcagtgcagaagggaaatgtgggctcagagcacacacacagagtccctgctggggtaccacctagtggagctgtgagaagaggaccaccgtcctccaggccccagaatggtagataccctaaatcatctctttcaaattcgaagttccacaaatctctaggacaggagcaaaatgccaccagtatctttgctaaaacataacaagagttacctttgctccagttcccaacaagttcctcatctctatctgagaccacctcagcctggatttcattgtccatatcattatcagccttttggtcaaagccattcaacaagtctctagagagttccaaactttccacattttcctgtcgtcttctgagccctccaaactgttccaacctctgcctgttacccagttccaaagtcgcttccacatttttgggtatcttttcagcagcaccccactctactggtaccaacttactgtattagtctgttctcacactgctgataaagatatacctgagactgggaaatttacaaaggaaagaggttttatggacttactgttccacatggctggggaggcctcaaaatcatggcagaaggcaaggaggagcaagtcttgtcttacatggatggcagcaggcaaagaaagaaagcttgtgcaggaaaactcttttttttcttttcttctttttagacagagtcttgctctgtcacgcaggctggagtcagtggcgtgatcttggctcactgcaacctccacctcccgggttcaagtgattctcctgcctcagccttccaagtagctggtactacaggcatgtgccaccacatgagatgagattttggtagggacacagccaaaccatatcattccccctgtcccctcccaaatctcatgtcctcacatttcaaaaccaatcatgccttcccaacagtcccccaaagtcataactcatttcagcattaactcaaaagtccacagtatttttagtagagatggggtttcaccatattggccagactggtctctaactcctgaccttatgatccgcccgccttggcctcccaaagcactgggattacaggtgtgagccaccatgcccagccaaaaactcttctttttaaaaccatcagttctcatgagacttattcactatcacaagaacagcataggaaagatctgcccccatgattcaattacctcccaccaggtccctcccacaacacatgggaattcacgatgagatttgggtggggatcctcttggctatcatttcaaaaaatagtcagggttgattatggacttagtattgaataagatgaaaatgtactgaaatggaacgatgaagataattgaccagggaaagcaggttacaagccaagagaggatacagtgtcacttcagatgctataaaagtgatgtttttattttttgaatgttatttggctatattttcaaattatctgcactgcatatgcactgcttctgtaataataaaagggtattaaaataataaaatcaagtctataaatcacacacacacaccccagcctcttctctacacctcagtgactaccaaccacatctaaattatcatcatttctcatctgaattattgcaagaagccattgcaataattcagatgagagttgatacaaagccttcctgtttccaaccttaccctcatatagtcttttcccaacattgcatctaaagtaatttttcaaattgcaattctgatcactgttctctgcttcagatcctccagtggattttcatctcactcagtaaattccaaagccttcaccatggccttcaagaccctacgaaatttgaccctctgcaacctctctgccttcatctgttaccattgtctcctgttaatcctgcctcagccacactgacctccttgttcttctcaaatggactagatgtgtgcctatctctagaccattacagtttctgttctctctacttaaaattatgtccctgatactctaatgcaagttctcttacttccttcaggacgctgctcaaatttcattttatcagtgaggctttccctgaacactgtatgtaaatattgctcccaccattttttttcaatgcacttaacagtgcctgaaatattatatatttatttctttattgtctatcttctctgactataagttaagctcattaagaacacaaactttggaggtattgttcaatgttgtgtccccagaactttgaacagtgcctggcacgtggcagatgttcaaataaatgtatgttgaatgaattagaaaatgataaatgtagggagacaaaagcaggtctcccatttatatccaaactctaggactctaggaaagactgattatatggaatcgtgtcacacagcatccatgggcaagagtggaggcagagataccagttaagatgctattgcagtcatacagataaaagaagacagttatttagaccagtgtggtggtgacagaaatggaaagaaatggaaggatgttgggtataattaaagataagcatataagactggctgttaattgagtatgggaagaatgaggagagaggatgtaaagaacatttctttttgtttgtttgttttgttttgtttttgtttctttttattatactttaagttctagggtacgtgtgcacaacctgcaggtttgttacatatgtatacatgtgccatgttggtgtgctgcgcccattaactcatcatttacattaggtatatctcctaatgctatccctccctcttccccccaccccccaacaggccccggtgtgtgatgttcccctacctgtgtccaagtgttctcattgttcaattcccacctatgagtgagaacatacagtgtttggttttttgtccttgcgatagtttgctgagaatgatggtttccagcttcatccatgtccctacaaaggacatgaactcatccttttttagggctgcatagtattccatggtgtatatgtgccacattttcttaatccagtctatcattgatggacatttgggttggttccaagtctttgctattgtgaatagtgccgcaataaatatacgtgtgcatgtgtctttatagcagcatgatttatagtcctttgggtatatacccagtaatgggatggctgggtcaaatggcatttctagttctagatccctgaggaattgccacactgacttccacaatggttgaactagtttacagtcccaccaacagtgtaaaagtgttcctatttctccacatcctctccagcacgtgttgtttcctgactttttaatgatcgccattctaactggtgtgagatggtatctcactgtggttttgatttgcatttctctgatggccagtgatgatgagcatattttcatgtgtcttttggctgcataaatgtcttcttttgagaagtgtctgttcatatcctttgtataagattattagtggatttctcagaagaaatattgtagaccagaagggagtgaaaatatagatttaaaatcctgaaaggaaataaaaactagcaatgaaaaatactatatccagtaattttatctttcagaaatgaaggggtgataaagattttctcagaaagacaaaagctagatctgctttataagaaatgctagtaggagttcttcaagctgaagaaagaggatgcttattagtaatatgaaaacatatgaaaggataaaactcactagtaaaaataagtacattgtcaaatccaaaacactctagtagtgtaatggcagtgggtaaattaattatatctttagtataaaagataaaagacaaagaaagctattttaaaaactaaagctataataatgtgttaaggaatgcaaattattaaaatatgtaaactgtcacatcaaaaacataaaataggctgggcacagtggctcatggctgtaatcccaacactttgtgggggccaaggtgggaggatcacttgagcccaggcatttgagactaacttgggcaggatagtgagatctcatctctataaaaaatttaaaaattagtaaagcatggtggtgcatgcctgtagtcccagctactcaggaggtggaggtgggaggactgcttgagcctgggggggtcaaggctacagtaagcaatgatcacaccactacactccagcctgggcaacagagcaagaccctgtctcaaaaaaaataataatatgtaggaggaagggaataaaagtgtagagtttgtggatgcaataaaaattaagttgttatcagtttaaaatagcctgctaattttgtgtaagcctcatagtaaccacagagcaaaagcctatagtagatacacaaaacattttaaaaaggtccaaagcataccactacagaaagccatcaaactataaaggaagaatgcaacagaagaagaaaggatcaaaggatctaaaaaaaaaaaaagaaagaaagcaattaacaaaatgacacaagtatgaccaaagtccactgcttctttattactgatatagaatatctttcagatcttaagggactgattaattacttgggagagaaagtttgtgttgagaagatttgcttgtgttgcaatgagaaggggaagttctactcaacagaagctgtacaggcacatatgacaaaagctggtgtaagctttttacagatggtgatgctgctttggaatttgcagacttgtatgagtttaggagtagctacccagatcacaaggaaggggaggaccctaatgaggctgaggagtcgcccttaggaaaggacttagaatatgatgatgaaagcatggaactgattctgccttctgatgccagagtgggtcatcactccttgatgagatactacaaacagtgatttggcttgtcaagagctgtggtagttgctaaatattgtgaggccatgggccgagtgcttcagtaatagagagccctgggatagactggcaacacaggagcagctgttacatgaaagtgagacatgcattatatccaaaggatgaagtcaaaatggatgctgaagacagaaatgaagaacaatgccaccaagcagatgcactttagggtccaagtgagattctgagagtctgccaggattgagtgattgtctgctgcccaagtttcctccttgccctgaggaccagggaaagccagattgtatgatggacacttttgctgctacttcacttgctctaacataataataaaaatgaaaatctaaaaaatattttattgaagaatgaaggtgaaagaaatacattttcagacaagcataaacagagaaacttcaccattagcaaaagtccactaaaatattctaatgttatacttgagacaataaaaaagtgatacagaatggaaggcatgagagacaagatgggataaagagcaaacaaagttaaatatgtggataaatagagataagtatcataaaacatggtcaaatgttttatgagcgttaagatatatagaattgctttattcacagttggtttgctgtcataacacaagtatcatgaaaatcactgctaaatctaagccaaaattgggaaaggaaaaggttcatgtcactatcatcaacgttggacatgtagactcaggaaagttcaacactactggtcatctgatctataaatgtgatgtgatcaacaaaggaaccattgaaaaatttgagaaagaacctgctgagatgggaaagggctcatttgagtatgcttgggtcttggataactataaactgaacatgaatggaatatcaccattgatatctcctaaagaaacctgaggccaaaaatatcctgtgaccatcattgatgccccagcacacaggggctttattaaaaaaaaaaaaaaaaaaaaaaacatgattagagtgatatcaccaaaatggtggatagaagcaatctggcttcactctcctccagaaaaaccaaaaacaactattcagtgtctagcttatcaccaggaatatcccataactcaaaacagaggctgtgaggatctgagtggccacatagaagagaaaaactgcaagcagaagataacaaaaatgggcctgtttaactgcagcatccccttcccaagctgccaggcaccatgcagaaaagttcccccagactgacagtatgtacatcagaaaaagtgacatctagatgaagagccagctttcccaccatcttgggttcctttgcagaaaaatcattcctgcctcaatccgtgggaagcagcctgattgcctctagggtaaaaaaatcctgagggcagctagagacaaaggatggaggcggggctagcaaccccagcatgcaaaacacattggctgctcttcatctaagccaaagaagacaccaaatgagagagaatgttcagcccgtggttcctctggacacaaaatcctaaccagatgtctcacccaaccaggatatccagtttgggacctcccccaaatcgggaataggcagtaatccaagccgttgcaagagctgcagcaaatctgggcttacagcaccatctagtgccaaaaaagaggcagtaatctcagagtaaggaagctctaattcatacataacctttagacaggcatactcctgaaaaaccaaactaagccagacacaaagactggaataaataacttagcattcatacaaagacatagatatatgtgcataaaaaacaagagcaaatagggagctatgacctctccaaatggaaacagcatggagccagtgaccaaccctaatgagatggcaaattgtagctctcaaatcaataattcaaaataaaagttctgaggaaactcaaagaacacaaaaaagcaactgagaaatttatgagataaatttaacagagaaatcaaaataataatttaaaaaaccagaaatgctggagctgagaaatacaactgaacggaaaaaaaaaatgcactggaaagtctaaacagcggaactgatcaagcaaaacgaacaatcaatgagctcaaagacaggctatttgaaaatacacagtcaaaggacaaaaaataattaaaaggaatgaagaacacttgcaagatctagaggactgcctcagtagaacaaatctaagagtcatgggccttcaagagagaaagagcaatgaataaaaagctcaaagaaataacagaaaatatttccaaacctacagagagatgtaagtatccagttataggaaggctgaagatcaccaaacagattcaacccaaataagactaccccaaggcatacaataattaaactctcaaaggtcaaagacaaagaggggatcctaaaaagagcaagaaaaaagaagcaaataacatataaaggagctccagttcatccgggaatatactctggaccagatgaacctacctgacattttacagaacattttatccaactactacagaatatacattcttcttatcagcacatggaacattctccaggatagactatatattaggccagaaaacaagtctcaacatttaaaaaaataaaattatattaagtatcttttctgactacagtagaataaaactagaaatcaatgacaagaggaacgtttgaaactatacaaatacatggaaattaaacaacatgctcctgaacaaccaataagtcaatgaagaaattaagaaggaaatttattgaaacaaatgaaaatggaaacaacataccaaaatgaatgggatacaacaaaagcggtactaagagagaagtttatagctataaatgcctacatcaaaaaagaaagactcaaataaacctggtaatgatgtaactcaaggacatagaaaaacaagagcaaaccaaacccaaaattagtagaaggaaaataataataataatcatagaaataaataatattgagaaaaagaaaacaatatgaaagaccaatgaaatttttaaaatggctttttgaaagataaaatttaaaatctttagctagactaaggaaaaaaaatgagagaagacccaaataattgaaatcaaagatgaaaagagtcattaaaactgataacacaaaaatacaaagtttcactagaaactattatgatcaactatatgccaacaaactggaaaaactagaagaaatggataaatttctggacacatacaacttaccaagattgaactatgaggaaatagaaaacttgagcagaccaataactagtaatgagattgaagcagtagtaaaaagtctggcattaaataaaagtccaggacctgatgacttcactgctgaagaaaaacttacaccaattatactgaaactatttaatattgcaaaaaattgaagagaaaagaatgtttccaaactcattctacaagaccagcattatcccaatacccaaaccagacaaagacacaacaacagcaaaaagaaaactacaggccaacttcgctgatgaatatagatgcaaaaatcctcaacaaagtactagcaaactaaattcaacaacacattaaaatgagtatttgtcatgcccaagggggattcatcctaggaacacaaagatagttcaacatatggaaatcaataaatgtgatacaccacattaacagaaggaaagacaaaaaccatatatttatttcaataaatgtcaagaaagcattgaataaaattcaacatcccttcatgataaaaactctcaacaaatttggtttaaaggagcatacctcaaaacagtaaatgttatatatgacaagcccacagctaacattacaccaaatgggaaaaaattgaaagcctttcctctaagatctggaacaagacaagcatgcccactttcatcaattctattaaatgcagtcctggaagtccaagatggagcaattaagcaaagggccttcaaattagaaaaaaagaaatcaaattccccttgtttgtagacgatataatgttatatttagaaaaacctaaacactccaccaaaaaactgttagaactgatcaacaaattcagtagagttgcaagaagcaaaaccaacatacaaaaatcagtagcatttctatataccaagagctaacaatccgagagagaaatcataaaagcattttcattttcaatagctataataaaaataaatatctaggaacaaatttaaccaaagaggtgaaagatctctatactgacaactgtaaaaccctgatgaaaggaattgaagaagacacacaaaaaatgaaaaggtatctatcccatgttcatagaatggaagaattcatattgttaaaatatcaatactactagatttcatgtattacctatcaaaataccaataacatttttcacagaaatagaaaaagcagtcttaaaatttgtacagaaccacaaaagacccagatatggtttggctgtgtccccacccaaatctcatcttgaattgtagttcccataatccccacatgtcgtgggagggacccagtgggaagtgattgggtcatgggggcagttttcccccatgctgttctcgtgatagtgagtgagttctcatgaaatctgatggttttctaagtgtttggcatttcccctgctggcacttattcccactgccaccttgtgaagaagatgccttgcttcccctacgccttccaccatgattgcaagtttcctgagacctccccagcaatgcggaactgtgagtcaattatacctctttcctttatagattacccagtctccagcagttctttatagcagtatgagaacagactaatacagtaaattggtaccgaggtagggggggcactgctataaggatacctgaaaatgtggaagcaactttggaactgtgtaacaggcagaggatggaacagtttggagggctcagaagaagacaggaaaatgtggcaatgtttggaacttcctagagacctggagggctcagaagaagacaggaaaatctgggaaagtttggaacttcctagagaatcattgaatagctttcaccaaaatgctgatagtgatatggacaatgaagttcagactgaggtggtatcagatggagatgacgaacttgttaggaataggaataaaggtggctcttgctatgctttagcaaagagattggcagcattttgcccctgccctagagatctgtggaactttgaacttgagagagatgatttggggtatctggcagaagaaatttctaagcaacaaagcattccagagtgacagagcataaaagtttgaaaagtttgcagcctgatgatgcagtagaaaagacaaacccattttctggggagaaattcaacccagctacagaaatttatataattaacaaggagccaaatgttaatcaccaagataatggggaaaatgtgtccagggcatgttagagaccttcgcagcagcccctcccatcacaggcctggaggcctaggagggaaaaatgctttcgtggcctgggtccagggctcccctgcagtgttcagcctgggacttggtgccctgtgtcccagccactccagctataagaggccaaagtacagcttgggctatagcttcagagggtgcaagcccccagcctttgttctgtgggtgcacagaagacaaaaattgaggtttgggaatgtccacctagatttcagaggatgtatggaaatgcctggatgtccaggcggaggtgtgctgcagaggcagagccctcgtggagaacctctgctagggcagtgaggaaaagaaatgtggggtgggagcccccacacagtcaccactggggcactgcctagtggagctgtgagaagagggccactgtcctccagaccccagaatggtagatccactgagagcttgcaccgtgggcctggaaaagccacaggcactcaatgccagcccatgaaagcagccaggagcagggctgtaccctgcaaagctatgggggtggagcttcccaaggctgtgggagcctgccttttgtatcagggtgacctaaatgtgagacacggagtcaaaggagaacattttggaactttcaggtttaatgactgccctattggatttcagacttgcatggggcctgtagcccctttgttttggccaatttctcccatttggaatgagtgtatttacccaatgcctgtacccctattgtatctaggaaggaactaacttgcttttgattttacaggctcataaacagaagggattttccttgtctcagatgagactttggacttggacttttgggttaaggctggaatgagctaacactttgggggactgttggaaaggcatgattctgtttttaaatgtgaggacatgagatttgggaggggccatgggtggaaacatatggtttggctctgtgtccccacccaaatctcatcttgaattgtagtatattgtttgtaaaaattcctgcctatccagagattttttaaaaaaaaacaatactttcttcaattttctcttacaatttaattttttacatttaactttttaatacttcctgtagactaaaagttattttggtgcattgtgtgaaccaaagatcaaagtagttttatttttttctgaaaacatctattcattttttcaattaattgattgtttatattaaggatctaggaggatctaaaattatggaattgtgggcaagggcaatttttgccttacatttcatgtaaggcaaaataatccccatgtgtcatgggagggacccagtaggaagtgattggatcatgggggcaggttcccccatgctgttctcatgacagtgagtaagttttcatgagatctgatggttttataagcatctggcatttccccttctgtcacctctccctcctgccaccttgtgaaaaaggtgccttgcttccccttcaccttccaccatgattgtaagtttcctgaggcctctccagccatgtggaactgtaagtcaattaaacctctttcctttataaattatgcagtctcaggcagttctttataccagcaggaaaacagactaatacagaccctaaatatccaaagcagtcctgagcaaagagaacaaagctggaggcatgatgctactttatttcaaactatactacaaagctgtagtaaccaaaacagcatggtactggcataaagacagaaacatatgccagtggaacacaacagagaacccagaaatgaatccacacatttagagccaactcatttttgacaaagtgccaagaatatgcattggtgaaagaatagtctcttcaataaatgatgttgggaaaactggatatccacatgcagaagaattaaactaaacccctatctctcactgtatacaaaaattaaatcaaaatggattagagacttaaatatacaacctgaaagtatgaagctactggaagaaaacattggggaaatgctccaggacattggtctgggaaatattttatggcctgggaaatatcaaaagcacagacaactaaagcaaaagtagacaaacgggattatatcaagctataaagcttccgcacaacaaaggaatcaattaacaaagtgaagggacaacctacaggatgggatgaaatatttgcaaactatacaactgagagggtattaataaccagaatatataaggaactcaaacaagtcaatggcaaaaaagcaaaggatcctattaaaaatgaacaaagatctgaataaacatttctcaaaagaaaacatacaaatggccaacaggtatatgaaaaactgctcaacatcactaattaccagataaatgcaaaccaaaagcacaatggatatttcactccagttaaatgacttttatcaaaaagacaaaaaataatgaatgctgatgaggatgtggcaaaaggggaatgcttgtacactattggtgggagtgtgaattagtacagatactatggaaaagagtatgtatgttcctcaagaaactaaaaatagaacgaccatgtgatccagcaatcccactgctggatatatatccaaagacaggaaatcagtgtatcaaagagatagttgcacaccaacatttattacagcaccattcacaatagctaggatataaaatcaacctaagtatacatcaacagatgaatggataaagactgtgtggtatatatacacaatagactattactcagccattaaaaagaatgaaatcctgtcatttgtggcaacatcgatgagcctggatgtcactgtgttaagtgaaataagccaggcatagaaagacaaatatcacgttttcacttacatgtgagagcttaaaaagtggatctcacggagatagagagtagaatggtgcttaaaggagtttgggaatggtatgggggggtgggatggaatgaagagaggttgattaataggtgtaaaatgaaggggtggcctgcccctcgtcacccacagtgacgagaaacactgtgggtgtttctcgtcaggtgggacgagagactgagaaaagaaataagacacagagacaaagcacaggaaagaaaagtgggcccaggggaccggcgctcagcatacggaggacccgcgccggcactggtctctcagttccctcagtatttattgatcattatctctaccatctcggagagggggatgtggcagaacaatagggtaatagtggagagagggtcagcaggaaaacatgtgaacaaaggtctctgtgtcataaataagtttaaggaaatgtgctgtgccctgatgtgcacgtatacaaacatcttggtgcattaaagagcagtattgccactagcctgtctcacctccagccttaaggcggttttctcttttctcagtaaatagaacatacaatcgggttttacaccgagacactccattgcccagggacgagcaggagacagatgccttcctcttatctcaactgcaaagaggacttcctctttcactaatcctcctcagcacagaccctttacgggtgtcgggctgggggacggtcaggtctttcccttcccacgaggccatatctcaggctatcacatggggagaaaccttggacaatacctggctttccagggcagaggtccctgcggccttccgcagtgtattgtgtccctgggtacttgagattagagaatggtgatgactttttttattattattattatactttaagttctagggtacatgtgcacaacgtgcaggtttgttacacgtgtatacatgcaccatgttggtgtgctgcacccactaactcgtcatttacattaggtatatctcccaatgctatccctccccccaccccatgacaggccccggtgtgtgatgttccccctcctgtgtccaagtgttctcattgttcaattcccacctatgactaagaacatgcggtgtttggttttttgtccttgtgatagtttgctgagaatgatggtttccagattcatccatgtccctgcaaaggacatgaactcatccttttttatggctgcatagtattccatggacaagcatactgccttcaagcacttttttaacaaagcacatcctgcatagccctaaatccattaaaccttgactcaacaccgcacatgtctctgcgagcacagggttggggctagggttacagattaacagcatctcaaggcagaagaatttttcttagtacagaccaaaatggagtctcttatgtctacttctttctacatagacacagtaacagtctgatctctctttcttttccccacagtaaaattacacttaaatagaagggataagttgtagtgttcgatattacagtagggtgactatagttaacaatgatttattgtatgtttcaaaatagctagaagagaagactgggaatgttcccaacacaaataaatgacaaatggttgaagtgattgatattccaattaccatcatttgattattacacattgtattcatgtatcaaaatatcacatgtatccccaaaacatgtacaattatcgtgtatcaatttaaaaatacatcatgataggcacctctcaggttgactgtactgtcctgattattgctagtggtgttaacaaatttgaagctagtatctttaagaacgggcagacccatgagcatgcccttctggtttacacactggaagtgaaacaactaattgttggtgttaaaaaatggatttcactgaactatgccatcgccaacagagctatgtggaaatcaataaggaagtcagccctacattaagaatactggctacaaccgcaacacagtagtatttatgccaatttctggttggaatgctgacaacttgctaacatgccttggttaaagggtggagagtcacctgcagagatggcaataccagtgtagcacaccgcttgaagctctggattatatcataccaccagctcatccaactgacaaggcttgtgcctacctctccaggaagtctacaaaattggtagtattggtaatgtctttgtgggcctagtggtgactggtgccctcaaacccagcatgattggtcagctttgctccagttaacattacaactgaaataaagtcttttgaattgcaccatgaagctttaaatgaagctcttcttggggacaatgtgggcttcagtgtcaagaatgtgtctgtcaaagatgtttatcatggcaatatggcttgtgacagcgaaaatgactcgccaacggaagcagctggcttcctgaaccatccagcccaaatcagtgctggctctccacctctgttggattgtcacacagctcacattgcttgcaggtttgctgagctgaaggtggttgatttccttctggttagaagctggaagatgacccccattgtgatttttattgctatggtttctttctaatttagtcttgaggtctctcccttgagaatggtcataagccaagagagccactttctaggagagtcctgaccagggggaaagttaagtttgagtgtgtcagcttggtgagacacaatgaggaagtaaaaacaaaataaatagtggaatagaatactaacaagtacctagaaataagtctagctaaaaatttgcaaaatgtctatggaaaaaaaaactatggaaatttactgagaaactttaaagagtacctaaataactttcaagatataccacgtacatgaattggaaaacatgatatttgaaaatgtcggttattcccaaactgatttatagattcagtgcaacctgaatgaaaatcccaagacgttccttttgtagagctcaacaagctgattctaaaattaatatgaaaatgtaaaggtttatgaatagccaagtccttcttgaagaggaagaataagatgagagtaattgctgtctaatatattgagacttattttaaagctataataattaaaacaatgtagcagttggtatagggataatcaaacaggtaaatgaaatagaatagaaaatccaaaactagtctaacacatatagaaacttgatttatgacaaaggtgtcacagaagtagagtttcaataaaatgctggaaaatgttggtatctatatagataaaacattacattggattcctaactcacaccatacacaaaaatccattcacattgcattacaagtctaaaagtgaaatataaaatcataaacattttagaaagaaaatgtaaaagaatatatcaataaccacagggtagggaaagaaagagaattgacatcaagatacaaaaagccctagccaataaggtttttttttataaattccacacattaaaattacaaacttatgctcatcaaaagataacataaaaacaatgaaaagattagccacggaatggtaaatgtttgcaatacataacacaaaggacacacaaaggaaacttatataatagattttaacaggcttctctgtgtccttcttctccagcaatcaaggaatatataaaaaagcatatcaaggatatatagggtactcttttgattcaacaagaaaaaagcagattatccaagagaaaacttggcagaaaaaagcttggataggtgctccacaaaagaggacatccaaatgactgctactcataagaaaagatgctcaacctcatagaacatccaaaaatgtaaaaacacagtcaataccagatatttgtaataatttggagcaaatggaactctcatacattgctaatgaaaatggaaaatggtccagctgctttggaaaacagtgtggcaatacctaccaaagccaaacacatgcatacctagtaattccgcccaacagaaatgcacatatatgttcaccaaaagatatgcaccagaaggttatagcaggtccatatgaaagtgccaaagattataacaactcaaatgtccgtgattagggtatattcatataatactatacaacaatgggaatgaacaaactatagctacatatgataatatagatgaatctcacaaccagaatgctaagtgaaagaagaaacaaaagaatatatgtagtatgttttatttacacacttcaaaacaggcaaaactaaactatatttttaaaggatgtatacgtaactggtaaaattataaagaaaagcaaagaaatgattatcataaagatcagaatggtggttaccttcagtgggaagggagaaagtatgattgaaaagggacatccagtgagtcttgtgggttgttggcaatgttactgatctgggtgatgattgcatttatgtaccaaaggcatttgtgttttatgcactttattgtatatgttttagttcacaatttttttagttcacaattttaatagggctttaaaaagtaaaaagaaaagagatccaagggcttgaccatgggactctcttatatttggagtatgtttataaactttacattcattcaacattcgacaaatattttttgagcacctactttgtgccaagcaccgttacaggtgctgggaatacaacagggaacaaaacagacaaaaccccagctttcatggaacttacatgctaataaagcttggcaagagtatttcaaggaagatgaagtggttaactatgcaaaatgcttctcaggcacctaggaaaatgaggatgtgaggcatttctacccacttggtacataaaattattgcttttcctctgctttttttctccagggctcagagtggcagtgtccctcagttcaagaaagttgttttccaggaatttactgatggctcctttactcagcccttataccgtggagaactaaatgaacatttgggactcctggggccatatataagagcagaagttgaagataatatcatggtgagttaaggacagtggaattacaagaaaattaattttatatatttattttcttgctgactataatgtattcccacttttggaaatttttaaagtatagaaaaataattccataattatctttgtgtacgttctatttttcctatgtatttttctccttatgtattcaaattataccatgcagaattctgattcttgtttttttactaaatatcacatcataaacatttcttacgtcattaaaaacacttcctatgtatgtttttaaaatactgcataatagtctattatatgaatttatggaaccatagtttatgtaaccatttattttgaacaagcttttagacagtttcttttttcactatataaataacgctgtaatcacaacagtttttctaagataaaattccagaagtgcaatgtatttgagcatcttaagagtttttcttattaattatttggtaatgtcccttgcacatttgtctttcatggaggaagtgcttttcttattgattatgttaccttatatattagatagtaaaccactgaacattttaatgagaggtactttttcaagtttttgttttctcttaattttataaatgatggtttttgaaataaaacaggttttaatttttaggtagtaacccatcaatctttactttttgacactttcattgcttttatgtttataaaaattcctgcctatccagagattttttaaaaaacacctatactttcctcagtttttctcttacagtttaattttttacatttaactttttaatacttcctgtagactaaaagttattttggtgcattgtgtgaaccaaagatcaaagtagttttatttttttctgaaaatatctattcgttgtttcaattaattgatggtgtatattaaggatgtagaaggatctaaaattatggaattgtgggcaatttttgccttacattttattttactttccattatattctatgataaatatgtataatttttaatctggaaagtaagccttttttaaaagataatatgcattcattctagaatttgtcatgaagaaccttaacttacatatcaactcctggcgttatggtctcttataacccctgcagtaacattttcccttttactctggaatggcttttatgtgtttaggaattttctcctttgcaactttgagttcataccttaaatttagaatacaaaacctcctcaggattaggtttgagttctaacagcatccatcttctgtaccacttcttccagggtattaaaaactttgataaagaccaaaagacaggtatttcttttagggatgtaaaccctaaggaccttaagatcctagaagattattcttgcttttttttttttgtcgttattgttctacaggtaactttcagaaatcaggcctctcgtccctattccttctattctagccttatttcttatgaggaagatcagaggcaaggagcagaacctagaaaaaactttgtcaagcctaatgaaaccaaaacttacttttggaaagtgcaacatcatatggcacccactaaagatgagtttgactgcaaagcctgggcttatttctctgatgttgacctggtaagcaggtgtctattgtgctgaccactttttggtttaaaagaaatggtctttgtgtactaagaattttgatatttatcctacgtgcaataagaagctttaaataggagagttgatcattatatttgtgttttagaaatgtcattctggaatctactgaagaggatggattatatttttggaaggtgggaggcaggttggactggcataaaaattgatgagaaatccactctggttcataggtgagagagcttatactcataggattgatgtcttccctccctaggaaaaagatgtgcactcaggcctgattggaccccttctggtctgccacactaacacactgaaccctgctcatgggagacaagtgacagtacaggaatttgctctgtttttcaccatctttgatgagaccaaaagctggtacttcactgaaaatatggaaagaaactgcagggctccctgcaatatccagatggaagatcccacttttaaagagaattatcgcttccatggtaatatattccacatccaaacattatcactgtgaaatgcagattgcactttgacaaatgagacttgatccagggacttgaacattgtatttatttagagtatatctgtgggagtggaatcctcatagatgtcagtttttttggtggagtggagagaaagaaacttatataatagattttaacaggcttctctgtgtccttctccagcaatcaatggctacataatggatacactacctggcttagtaatggctcaggatcaaaggattcgatggtatctgctcagcatgggcagcaatgaaaacatccattctattcatttcagtggacatgtgttcactgtacgaaaaaaagaggagtataaaatggcactgtacaatctctatccaggtatgagcttgtttgtgctctttcttctacctactctatttgttgagtacttactttaaatggtctaggcactgggaacacaatcagtgatcaaagcagacaagctccatgctcttaagtaatactttttcaaatgctttttaaaccatttgttcaaagcaaatgaacaagataatttcagatatagaaaaattgctaaaaaggaaatagaacagaataaatggataattaatgtcacagtactttcctagggaaaaggaatttattcctttatcatttaccatctcaaatcccatagggcaccagtagtcatccaaagagtcatttgtttatgtatgtaaccagtatattgattaagcactactcataatgttgatcacaacacaattttattttggttcttcactgtccctttaaaatagatttggccaggtgcgatggctcacacttgtaatcccagcactttgggaggccaaggttggaggattgcttgaggccaggagttcaagaccagcctgggtgacaaagcaagacccccatctctacaaaaaataattagccagacatgtggtatatacctgtagtcccagctacttcacctacttgggtggctgaagtggaaggattgcttgagcccaggaggttgatgctgcagtgagctatgaaagtgccactgcactcaaacttggacaacagagcaagaccctgtctctaaaaaaaaaaaaccatccagtttaatagcgggggtaaactttccttatttcttcgtaaaaattctgataagccctgtaacttttctgctcacccttaagtaataaacaggactaaagtcactttatgtcacaaatacagttcaaatcagaaattacaatgtccatcccaagatattaatcaaaattgtaaacttgatttaacttcaatctcccctcctccaacttgagcctgcatcaggctggaagtctgcattggaaaagggagacatggttgagtcctctgtttctgtaccttgtgatgatcgtgcttccccacaacccctttatagctgctgttttgaactccaacatggataggttaaaggtaaggggataagatagttcttacctatttacagctggcaccattgttgtaaactagcttaacactgtttgtgcctggcaatacttgttgactctttctcctgcagggcactttcagggaactctttagagactcccttacgtgactgtcatgaaatccccttgacatgatttcttccacctttactctgggtggtcacttgtgactcatttctcagccctcagtgttcacctgcagcttcttgttgctggggtaactttacccttgtaggcagctctagtggactggatccagagggaactcaccctgacttatctgtttcacagagtccacatctggccaatgggaaacacaccttttgctcagaaagaccctgggaatgtaggtcaatcataatgcagtagcattctcctgtcccaaccatcaaagaattcagtcaccctgtttctcatctcctggggggaggggagtggtcagaactcaatctccacaacccccaactgtaagggtcacgtagcaagcactttgcatttgaggggtccaaaagtagtggaactaccaaatttggtaggtctactctgatatttcgcataaaccaatgtatctcatgctcattttttagtgaaaagaaataatttctgttcctgttggtttttataaggtgtttttgagacagtggaaatgttaccatccaaagctggaatttggcgggtggaatgccttattggcgagcatctacatgctgggatgagcacactttttctggtgtacagcaatagtgagtagcaatgtgggcagaggttccctacctactcagcctacttctttacagctttcttcctttctggaatggttgcttgtgtcaggaaataaatacaagtttacatcattatcaaatttaaaatgaatattgctggtagaaatcatcagagttctcagagtagggcagatatacttgaagctttgaacactttgtacctgaagctctaaataattgacaaaaaaaaaataccacctcattttcacaacttggtaaagctcgaagatctccagtagcagattttggaatttaatgttgatttagttaccagataacttagaaatactacttggaagagtttggagatttaaccctaaacaagtaagagagccactggtctatttatgtacggaccccagtttcttcagctgtaaaatgtgaatcattctagcacctgttaggattaattaaatgaactaatacagtaaaacgttgagtacagttcttggcacatttaaacactaaaaaatagcatttgttgacgttctcccattttcattgacttacatttgagaagctgaattttgtgcacttctagttactgtgttccacccgtttcatttcagagtgtcagactcccctgggaatggcttctggacacattagagattttcagattacagcttcaggacaatatggtaaatactattatttttgctccaagaacctgggctgattatatctttttttaataatctggtggagaatctcagataatgaatccatctccatgcttctattagttctattccataagtgcctctcaaatacatctcctcctctccacttcccactgtggccatcttaactcaggtcaccatcatttcttacctgggcaatgacactgcctccttaaatatcctccctaccttcagtatttcttccttgagtcaattcttttcagtgcagcaggaagctatactttcctatgagcagtaatggtaaagtttgactagggtctatagagaattctcagaaattgttttagagcactactgcccacaggctaaatgcagcacactgcctgtttttgtatggcatgtgagctatgaacagattttccatttttaaataattgtcaaaaagatgaagactatttcatgacatgtgaaattataaaattcaaatttcagcatccgtaataaagccttattttggaacacagccacgtccattaatttacatatcatctatggctacagcagcagtaacatagttgcaacagagaccatataatatgcaaagcctaaatgatttactatctggccctttacagaaaaagtttgccaacctatgttgttgtgaggtaaaaaaaaatcctcttgaaaaggaggcgtgagagttttacaccaaaatagtaacatttttcactaggtggaagggttacattttaaaatgtcttttatttgtatttttactaatttttacttttcattttctgatttttctacaatgaacatacattgcgtaataaataataggcggggcacgttggctcatgcctcccagcactttgcaaggctgaggcaagcagatcacctgaggtcaggagttcaagaccagcctggccaacatggtgaaactccgtctctactaaaaatacaaaaattagtcgggcatggtggtacgcgattgtagtcccagctacctaggagactgaggcaggagaattgcttgaactcaggaggtggaggttgcagtgagccaagatcatgccattgcactccagcctgggtgacaaagcaagactccatctcaaaaaaagaaagaaaagaagaaataatattattatttggtagtgttggtaacaaattgcagtatcagctagttagaggtgctaacaattaacaaaattataaattttagaaaataaaatggacaacaaggataagcaatatccttagatagtaattgatactggtatgccataaagcctttatgtttttctctattttcaccacagcttagattaacctttctcaagacaataattttattctcaagtgtctaggactaacccagctgaatttaatctctgtttctttacttgggcaaaggacagtgggccccaaagctggccagacttcattattccggatcaatcaatgcctggagcaccaaggagcccttttcttggatcaaggttagaaaatgtaatcaatgatgggaaatgtatcacattcaatcaattgcattacttattcctcttgcaagctcaaaggattctatgaatatgagaaaactaaagaacagaatgccttaatgatttgtacaaaagcagtcatgaacaaagagatatggggatagaattgagtatattgatatgtcctgtttctgtattttagtccttctactgggattagaacatctgaatattttctataatattgaactcgtcatctctcaagacagtatatgttattattagatgcttccaactgcccacgtgtccttaagtactccaatcccctttattttaacataaaacaaatggttcacaaatgcaaaccacatgtgtacttttacattttctgtagccacgttttcaaaaatgtgaaattcactttaataatacattttatttaactcaacatatctgaaaatactatcatttcaacatatgatcaatgaggccccttcaaagacagacagatggaaactcttgggtctcttccatgcctcacaaaagctgagggcagcttggaagtgcctgctcagcctctccacctaaacataaggctagatgccttctagaagcccaaacaggaaatggagaaaacattttggtttccatctttgcaaatagcatgtctattaatgccacagcattgttttgtagacactgccaattttgactcaatctgagctgctgttcactaatccctaagtattttttgttggtttgtgcttctgccaaacaacatgttatgttcttcaccttgtatttctatggttattttcaaccttaagtgtatccctatatagagaacatgtttatctatttggccaccctgtgtctgtctgtgctatttaattttttgtaataacattcttatttgggagggcggaattatatcttcctcactagatacaacctgataagactagtaaatagagtgtcctgtctgtgcctagccaatgaaccctgaatgatatactctgttgtttccacttactagatttggcccattgtttcagcttgccgatcttcagtgtcccaaagtatttcctagtttttccagttactgatttgatcagtaaactttctaatactgcagcaaagtcatgatcaaaatattgaagtagacaagacttccttagtatgtgcacaatacaaatcaagctgttaagtccttactacaaccttgtgaggtagatgttactatcatcttcatttcagataatgaaattgaagcatagagaggttattgtggcccaagtcacatggctaataagtgactgagccaaaattcaaattctgatagttgggctccagaaccctaactggtaatcgttgtactacactgtttccggaatgctccctttaagttgataaccatctattaactgtcactgttcacttgtggtaattaaaccagttacaaatccacctagttatgttatcatctaccactattgaatcgccttatcttcaaggtggttttgccatctgtcctactaaggtccagctagactttttatagatctcgtaactttataaaataaaccatggagatggagttgaaagggggtgctgacaaggaagggagttggagaaggcatctattctcgtgagaaggcctgaagagtgcacaacagcctggccccaagacacaagagcactgggctggcttgaggagcaccaggtgaccaagaccaggcaatgcacagggggaagtcagcaggccccatggagatacgcagctgcagtgtttgtacttttatacagtgaaactcattaccaccttgcttacttcctagtagagagatgtgtcttgtagttacactgaaacacctggctgggcacataggtgaagctgttgagtctgtaattgtcaaactgctcccaggtgccaattataatgtagaagaggcacaagaagatgaagtggataagcctggcagtttgtcaagcattcatcagttgtcaagcatttgtcagttgcagaatgtaggtaggctgccaaggctttattgtagcctggttctattgcagctttattctagcaaggctgctggaaaatacaataatcactggtccaagaaagaactcttatactctatctatatgaagaaacagtaaaagtcaattcagtagaaatcatgatttttgtgcctggtgctttcacttttttatgccacaataccaagaggttaaaatgaagtgtctttgattgggaataccatctatctgggaaaagacagggctgcaacttctgaagaccttgacactctgtcctgttaccctgcttcatttttctcctgcgcttatcactacttgatgctataaacaaataaaaacatatatgatataaggtctatttctcctactcaactgtaagttccatgagggcagggctttctttcttgtttactactctattccctgtatctaaaacagtgcttggcacatagcaagtgctaaaaaatattctttgaatgagtgtatgaatggaacttacagtcagctgaaggagacagttattaagcataagagtgatgaccagtccaattgtgtgtgtcaggcatgtgtgaaaacgtgctaaatttgacttgcttattaggacagtaactgatacttctaatgttcttgcagcccatgacctcttctttaagaagtgtccattctgtactactttcccattattcactcattcattccaaagcatttgctatacagcagtattataccagataccatattaggtgctggggctagagagaatataaaagctaacattgattgagtgtttagtatgcgccaggccctgaactcagcacattacatgtattaactctttaacccctatggcagccctttgagataaaaactaatattatcttcactttacagataagttgagacacagaaagttaggtgactcaaatgggttcactgccttaaggatctcagtctaataaggaaagcagaaaagcaaagcaaccttataatatggtgcaataatttgctataatgaagttatatacaaagtgaagtagaagcatagaagaagcagcactaaatttgtctgggtgagtcagagaaggctaaccaggaaaaatagtttctgaactaacacttgaaggaggtgtagcagttcatcactgacagtgatgttggggtgggtctggtttcaggagaggggaggaaattggctttggtctgaggctgaggtgtgggcaaagcattagcttatgtgggtccattagcttatgtgagtccacaaaaggtgtgtgtgtgtttgtgtgtatgtgtgtgtgtgtgtgtgtgtgtgtgtgtgtacgaaatgggggctcaatgatttggtagtggtttggtttgtcaagaagcaggctgggaactcaataagcatctttccattcatttctactgtgtatcccacagcttcacacacacatgcacatttcaacattggtgactgcttcacttgcacacctaaggtaatgatggacacacctgtagcaatgtagattcttcctaagctaataattagtttcaggaggtagcacatacatttaaaaataggttaaaataaagtgttattttaattggtaggtggatctgttggcaccaatgattattcacggcatcaagacccagggtgcccgtcagaagttctccagcctctacatctctcagtttatcatcatgtatagtcttgatgggaagaagtggcagacttatcgaggaaattccactggaaccttaatggtatgtaattagtcatttaaagggaatgcctgaatactttaaagaattttggcagatttcagatattggacaaacactcttagcttccacaaacttaattccaaaaaataatttttcacttatgagcaatagagttattacggacatatcagcaaaaatgtagtagtgtcaaggctcatagatgatagaaatgaagagatgctgtattgatagaaatatgtgattcaggactgtgtggattgatgattgtgagcttgcttatggatatcctaggtttgaggttatagtaggacaatcaggttgaaatgtccagcaggcagtaggtgaaagacaagtttagggggcaaaaccatggatggagatgaagattcatgacttccacataaaaggatgggtgaaactttgggaattgatgaattctctagaggtgagctcaagacccttaaaggcttaaaacctcagcgttattgtctactcttccctcatttttatgcccacaaatctggtcaatcctttatttgcaatgcctctcacatctctttcttctgtttccatttataccgctgttgccacagcccagggtcccatcacctcacacttgatctattgtattacattcctaactagtcttcccccgtttctaatctgttctccgataaaagctgcacatcattttcaggataatcatcagtcgcctgcctaaaacttttcaatgtcttcccattgtctttagaataaagttcaaagtcttcaaatgaccccaagcaagataacttttgtttgcccctttagatccattttcctgcttctctaccctgcttcttgttctgtgaggtgagcttgtatagaatacatcaacaggttaccttgtcctccagcttttggttggatttcaccaacagggagcactggcaaaagattggcatatttattcttctgactttctccttgcagaggagttcactgtatctccccacttaaggtcactgtttccctcagagtggctttttctacctgtactagctactattgctgtgtaccaagccacttcaaaacttgctgtcataacaataaccattatgttttgctcacagattctgtagatcaagactgggacacagtggggatgggtggtttctggagcctcagttaggattatttaacagctgggtgctggaatcatctggaagttccttctcttgcttttctggtggttggtactgactgtcagctaggacagaatctggggttgttgactgatgtaactttacatggattatccctgaggcctggccttccttacagcatgtttcaaggtagttggacttctttttgagggggggtaggaaggtggggggaggacagagtctcactctgttgcccaggctggagtgcactggtgtgatctcggctcactgcaacctctgcctcccgggctcaagtgattctcctgcctcagcctgctgagtagctgggactacgggctcatgccaccacacccagctaatttttgtatttttagtagagacagggttttgccatgttgaccaggctggtcttgaactcctgacctcaggtgatccgcccacctcagcctcccaaagtgctgggattacaggcacccggcctgtagttggacttcttacacgtcattttagggcctccaagtgtgagtgttacagttaacaaggtgaagactacataaccttttctgaccgagtcttctaagttatgtagcatcacttttgttgacaaaaagtgttgaactctataaaatatttgaagagatttattctgagccaaatatgagtgagtatggcccatgacacagccctcaggaggtcctgagaacatgtgcccaagatggtcagggcacagcttggttttatacattttagagaggcttgagacatcaatcaaatacatttaagaaatacactgatttggtccagaaaggcgggacaactcaacctgggggcttccgggctataggtgaatttaaacattttctggttgacaattggttgagtttgtctgaagacctgggattgatagaaagggaatgttcaggttaagataaacattgtggagaccaaagttcttttgaagtcttatagtggctccccttagagacaatagatgacaaatgttttgtattcagatcttagttaatctctttaggattgggaggggctgggagaaaaagatctagctatgttaatagagattctttacagttgcaaatttccctccacaaagaacagctttgcagggccatttcaaaatatggcaaaaaaacatgttttggggtaaaatattttgattttcttccttgtctcataatgttatgccagagtaaggttggaaagtaaatcatgacatataaggttaaataaaacccatctgatgagaatttatgatttgtagggcatgactccccagaccccttagataggaatttgggcaagataaaaaaaaatcagagtttagtcctcactttcaatacattctattggttataagcaaatcgcatatccacccagattcaaggggaagagacatagaccctaatttttaatgggagaaatgttaaataattggtggtcattttttaaagccactacaataatctatccaattctctctttcaggatgtttctctcttctgatcctttcaggtttagggattgtcaacaaacaaaaagttaaaccctgtaaaatacttgaagagatttattatgagccaaatatgagagaccaatggcctgtgacacagccctcaggagatcctgagaacatgtgctcaaggtggtctggctacaacttggttttacgcattttagggagacataagaccgaaatcaatagatggaagatgtacattcattgagtttggaaaggcaggacaactggaagcgaggcggggcttccaggtcgtaggtagattcaaagattttctgattggcaattggttgaaagagttaagttattgtgtaaagacttagaatcaatagagaggaacatcggggttaagataaggggttgtgaagaccaaggttctgtcatgcagatgaagcctccaggtagcaggcttcagagagaatagattgtaaatgtttcttatcagacttaaagagtctgttctatcagtctgaaggtctgtgttgatgttaatgctggtcagatttttctgaattccaaaagggaggcgggtataataaggcatatttgatccccactttcccatcatggcctgaacgtttttcaggttaactttggaaggccctttgccgaaaggaggggggattagaattttattttgggtttacaggatggtaatactctgttcccaccctcctaactagtatctttattaaaccttccacaaattatcctaatttccatgttttctgttccttgctggatcccttgtttcatacagtaattggtgctagaagaaaccccaggaaacagattttcaaaatgcaattctaaggttatgttgctaatatattcaagaaacacagagataacatatttgccaaggaagaaaatgagcagttagggaatccatgacatgtgttagtattatagtttctcagattatcaccagtgatactatgggatgagttgcagatggcaagtaagacactggggagattaaatgacagtggcatttagtcactgtggcaacaaacgtagcattacctgattgtagagtggtctgtcttcttacagccctagagggcatacacatggaaaaagaaatgaaatgttatgaatatatacaaaataagaacactgatgaacatacatggaaaatcaggatgcatgcatagagcttttgaggaatactccgtatcctgtggttgtaggcagatacgacttaggggctgagcataagttgcagagctgcagtgacaattaaatgcttaactccaccagatctattatgctgtggtaagagtaccggtgggaaggagtgaaactctgaggcctgagatggaggcatttaggcagacatggatgaggctgagaattgcaaacctccaaattcccctgaacctcctttgcctgaggaggcaaccactccccagtctctgaagcagtcatccctcttttgtgtaaaagcctttcagtggctataactgagataggtgcctcacaaaccagtgactattctccttagagaccctgtttggacactacgaaagccaggcgagtcacagaaaatgacagcagatcacaaatttaatcaggtggtgatgccaaaaaacaattgcaattccagatatcatatctctgttgaagcaaatttacacagccccaggcacctgatatggaagtattgacctagagaatgttttttcttcatttccatacattagtaaaatcagaatacatttgaatttaccaagtaggaacaagagtattaagtttactgcccatgcatcagggcaatgttagctctcttgttttctatcataatatagactcaagggacctcaaacatctttacatcccacaagcacaatgcctgtccattacactgatgacattatgctgacaggatctggtaaacacataacaaataagcctgtcttgctcttgactttaatgagaatgtaacctgtgtttcactgtttaatataatgttcactgttagtttcaaatactttttatgatgtttaaaaagttttctcctatccctattttatttgcaatggcaactgaattttatcaaatgcttttccagcatctttgacatggtcacatttctcttttgtgttgtcaaattatacttaacattcaatagtgtgctgacaagaaattaacaacccacaggggagcaaagtgagaagaggttaagaagtaaaggccttgatttatagcattggcagatttccctgacataaatactactcccatcatgcctggccccagggatgggaagagatgcttacttacaattggctctcacagaccagtgcaagagcactactgtgctccatttctgggaaaactttcgtcagtcatagtgtgttagttatttaaaacttagctggatccaatttgccaacatttcatttataatttctatatctatattcatgaatgaaatgggtttagctttttcagtagctctacttaccaggttttggcatgagggttatattaaacttgaaaataaagtgggaaagcttccatttttttccatgaagactattgctctagaatagcttatttaatgtaggaatccagtatttaatgagagtaaatgaaaaagccatatgagccatgtgctttatttagtgagagatactaggctatattttccaatcgttatatgattattgctattctcatttgtgttgccttgagttaatgtctgcaaatgtgcacattagagtcatatatcccttcctgtgccatacatctatatctgtatacacacatatgtcttttctccttttttcccttctgtatcaagagttggcaagtgtttgtctattctattaatttttcaaagaatcagctcagttttaaacccaaacgtggttttgaaagagctgtttctagttcatcaatctctgttcaaaactttaaaaattctattttcctttcttttggtttgtttcctacaatctggaggtgaatgcttagttcacttattcttcaatctttgtattttaacgataaggataaattacttacagttattaactactctcatgaggttcattccttgaacagtcactgagcaactactatgtcctgggttctaattcaggggtgggcaaactatagccccagaatttggcccatagcctgcttttgtacggactgtgagttaagaatagtttttacacgttgaaaggattgcaaagacaaacatacaaagaaacaaagaagactgtgcaacagagaccacctgtggtctgtaaagactaacacatttctatcccgcccttgacagaaagagtctgtgggctgctggtctcctctaacggtggtagagatgcctgcacggttaacattaatccttggcaccagaatcctcagcacctaggaaccagatcttgcctaacacgctaatttcagtcttgaccaccttcctccggcgtagcggttctcaaacgtctttgtctttgtactattcacgtataaaatattctttcataagcaacatttatccttttgggaatacctcacaatggggagaaggggaaccccaacagcctttaagggttcactgcttcgctgccaccatttccgacggtttacactgttttaagtgtgaatttggaattgttttcaagttaaaaagcaaactaatcatgtcctctgaaagtatttgcttttggcatgctagaaatcagtgttgacttttgatactgatgtgatacattacgagggaattctcaaaactgctgaaatctggcctcggcccagttatcactgctcttaagcttctgagggagatacatgaatgagcccacggcaaatggaaaacgaggagttttagtgtttcctagaattatgctcagatacccactacctgaccgtctggttatccttcccctcacctccctgacgcaaggagtttggaccagaggcctaaggaggcttctcctgaagcccaaatcccaaactggtcaccagtcatgctccgtaactcctgaacctgacaagaagccagccggccaggtctgcagcccgggttaagaggagcataccaggaaagagccaaagagcaaaggagcatgagcccttcaaccgcttttacaataatttgggctaggcgttcagggctccgtaggacccttcctggcagccaagtgagagaaagaggaatgatggtggaatgggcctctcctgtgcttcccattacttccacactgtcgaaatagaaatagaagcagaaaagaacaccctacaagtcccacccatttggaggcactcaactcacagtgacaaccctccacacctctcccctgcaaaaagacgcaaaacaaaaacacctactccaaactgtgtccttacatctcagccccgaagatcaggattgtgtgcaacttcggcccaaaggatgcatttccccagggttgaaagtttgagaaagaggctatattctgaagagttcttgttgtcaccatcaaaaggattaaaaagacgcaataaataagaaaacagcgtagttggggggcatgctccatttgagccagaaagccttggaaacttaagtgttctcaaacggaacgccatcctgctttgggggaacacggaggctgccttgcagtcacgtgatcgcacaacaccaaagggccacgcactctgatttcacctacttaactaaaagttgcagcaaaatccctattacaggccaggcgtggtggctcatgcctgtaatcccagcactttgggaggccgaggagggtggatcatttgaggtcaggagttggagaccagcttggccaacatggtgagaccccatctctattaaaaatacaaaaattagcccagcgtggtggtgcacgcctgtaatcccaggcaccctggaggttgaggtaggagaatcgcttgaacccaggaggcggaggttgcagtgagccgagatcacgccactgcgctcctgcctgggcgacagagtgagactccatctcggggggaaaaaaaaaaaaaaaaaaaaaaaaaatccctattacaaataaaagctgttgtgatccagactgcatatacctctgcgaatggaaccagaaccgtgaattccaatgcaaatcgatgcatcggcaccagacccgctgcactggatgtatctgcattgcagtcacccgagtacggagcacatcatagatgatctctgcaggttcgttgcccacataggaggcatagcgcaaatttcaaaggaacgaatacatcctggagcccaaacagctatctggttctgctgctggcctcctgacaagtaggtaagagagtcacattttatagacgacggacaccaaaaccacacatgaggagtacaagagtagctttatcatggatttagggctgtggttacaaggaagctgtaaggaataaaatgactcccatgaagacgtaccgtgcggacgagtggaaggagaaatttggccattacaaagacacaggaatatgttaagaagtgaggggcaggatgaaatcatctagggtaggtatttagagggagggcgccgtgcaaaataaaatcctcactatgaaacaaaggcggaggcaggaggctgcgttaggtggaagcagcggaggaaggagacgaaagggattgtcattttcatgtcgtggctttttagaagacagccatgtcctctactctgattctatcaaaatgtgttctcggggtgctggtaacgttcagccaacgaaataattcctatggcggcagtaggaataacaaaacgcagaagcgggaacgatgtctttttattcctccccagacgcaaacgtggatgcatgaggtttggtaacaggcaaagtcatctggttaacgtgactgatgcaaaaagtccaggcctgggcaaaaagaagtcactgggtgaatgggatggatcagactccctgtcctgagggggagatggtttcttgcagaacgaggtgaaggaggtggttctgctcagcagtcaacagtggccacatctccacctgcagcgacttgatggcttccgtgtccttttcgtgggtagccatgaccaaagactggagcagcagaaagagctcctcgggaagctggccgctgctctcctgcccgtggctgtcaaaagcctcccaggagtacttctccagggtctgggcgtgctccggcagcagcttggcgggcggtggttgcaggaggagcagcagcagcacgcgggacacctcgcagcggaccagcacgtccgagaaggcgcccagggcggcgggagagggcgccgccgagccggagttcggaggaagcagcgcggccggtagggcgggcgtcgccccgggcccgggctggggtgccggcggcgggggcggcggcagtgactgcaccgggtggctgccgtgctcccgcgccaggcgctgcatgcgcgtgaagaccgccagggcgccggtgtagtcgcgcgccagcagctggcaggaggcggcctcgccaagcgcctgcagcgcggccaggggcagctggggcagctggagctgggcggcgcgctggaagtgaccggcggcggcggccggctggcccaggtcgcgcagggcggcggccagctcgaggcagagggcggcggcggcggccggctggcccagctcgaggtgcagacgcaccgcggcgcccagggcgctggcggcggcctgcagcggctccccgtaggcggcggggcagaccaggcgctggcgcgcgtcgcgctcctgccgcaggaagaggcgggcggcctcggtgagggccagcgcctccccgggcccgtggaagagcgcctgctggcagcgcgccaccgccagctggcaccaggccgcgtagggcagacactcctgggcgcgcagctcccggcccagctgtccgaactgctcgccggcctccgccacgttcggcttccgcaggaaccgcttcttcagcttgttcgataccagccggtagcgggccaggaagtccccggcctcgggtcccgggccggcgccgccgccgcccaggcctgcagccgctgccgccatgctcgccgccccaagcacttcccgacgcgccgccgcagctggcgggcgggccggggcggggcgacgtgccctgcgtccccctcggcgggctgccgccgtgcccgcgccggctccccagcccgagcctgccccttgccctgatgaggtgcaaagagcgggatcggaggcggggcctggccgggctgtgagcggcgtatgcaaatcgagggtctcggggatgcggatccaagaccctgggaaggtacgcggggcctggcggggcaccagctgctgctagctcggctgcaatgcaagtggtctaggttgctaaaggcatcccacagcctctccatctgaacatgacccaaacgaaactcgtgaccctaattccatgtctgcgcatttctagactgttgtccccccccccccccgccccgactactcagtcctccgtcttccggtccagggccccttgccaagcaccgggtccacctctccgtccccaccccggttgccttagaagtccgtcctgtcgcaacactgcagtcatggtcttgaggcccacccgccccaacgaacaccatcatgctgaggactttcccgggcaggccctgacttgctcagaaccagcgggggtgtccccttcccacccagggccactcccctgcactgtcacccggagagactgctcctctgtgccatccctggctcccacccaaccccagacccccaccacctctccatccctccagctgtggaggtctcacaaccccccaacccatctcaccgcccccccacccccaccccaaggcaaagtgactgaagcgggcagatggcttccttgaaacattttattgacagaattaatgaaggcccaagactttggggcctgggttgtggggggagggtgtttaaggccgggggttcaggccgggggatttggggccgggtgggtggacgagtggacctgtcaggtcccaggggccgggtgtcagaagctagtcctcgccaggggccacttgagagatggtggtcgtgttgaaaagggtgctcagtagcctgtcgttgtgaaccaccatgtccagcagcaggggagtgatgttccgctctccgctgttctgggcctcgttgcccgccagctccgggaccttggccgtcaggtactcaataaccgcagcgaggtagaccggcgccgtgcgactcaggcgctgagcgtagtggccctcccgtagactgcgctccacctggctcactgaaaacgaaagctccgctcggacggtgcgagagcaggtccgcccccggccgccagcaccggaggaccctcggcgtctcctcctcctcggcatgctgggcgttgagtgtgctatctcggcttggcccagctaggcaagatggctctcaagaggacagttaccgcgtccagtactgtgtatcctagcgaccagggcccagcccctcattggctagggagccgagaccaatgggcacgcacatccggcgacgggcacgcatgtggtgacggcccctcacaagggacacacgtccgtcaggtgacctcatcactttcccattggcctcgagggagcaggcctgggcctagaagtggctggagggccgtgggggtggggtggggcggggcagggggaatcgcgctggtgaccctctctttgccagtgggaactttccctttctactggatgggaacaccgtgggaaagacaaaggggtgggcgaggggaggacgggtaccacgccttcacaatgttgcacatccatcacgaccacctagttccaaaacgttttcaacaccccgaaaagaaaccgaaacccctgtacctataagcagtcacttgccgcacgcctccttccacaccaccactaccagcccccacaccctcccacacacaccccctgcccccgcccatacacacgttcccgatagtccctggcaacccctagtccatctgctttctgtccatagaggttagcctgttctggagatttcctatagatggaattatacgaccaaatgtgaggccgtgtgtgtctggctgctttcacttagcgtaatggtttcatcagggtgcatccatgtagaggcatgaatcactacttccttcctttgaatgactgagtacgattctgttgtatgaataggaggccacattttgtttacccactcgtcagttgatggacaggttatttcccccttctggctattgtgagtggcactgccatgaccatctctctacaggtttttctttgaatatctcttttcagttcttttgggtctatttctagcagtcaaactgctggctcgtgtggtaattctgtttaacttattgaggaaccaccaaactgatttccacagcagctgtaatctttcgcattcccaacagtagtgcatgagagtcccaatttcttcacagcctcatcaaaacctgttttctgtttgcctcattttgttttgtttacagtagccatcctactgggtgtcaagtgctatctcatggtggttttcattcgtatttcccaaatggctaatgatgttgctgtggtttgagtgcatcccccaaattgtgtgtcttggaaacttaatccccaaattcacatgttgattggaggcgcagcctctgagacggtaattaggattagataaggtcatcggggtgagacccccaggatgcgactggtggctttataagaataggaagagaggcctgaaacgacatacacgctcttgccctctcgccgtgtgataccctctgccgtccccagatgccgggtcacttcccagtccccagaacggtaagaaataaatttcttttctttataaattgttcagtgtcgggtattcaattatggcaacagaaaacagactaagacatcttttcatgtgcttcttggccctctgtacctctgctttggaggaatgtctattcaagccctttgcccattttttaattcggttgattgtattttggctgtgggcttctaaaacttattcatatattctggaaaatagactcttatcagatatgtgacttgcaaatgtttctcccattcactttctggatagagccctttgttgcccaaaagatttacatttggatgtagtccaacttgccaaatgaaaagatatctgtggctttgcctttggtgtcatactgaaggagctgttgcctaatccaaggtcgtgcaaagttacatctccgttttcttcttagagttttatagtttcagcccttacatttagatctgtgatccattttgaattaattctttacatgatgtgaggtaggggtccaggggccttcttttgcatgtggctatccagttgtcccagcgcagtttgttgaggggattattcttcccctccacccattgaggggtgccggaactcttactgaaaataaactttacataaatatatgggtttattcctgactctgagttctgtaacattgacctaatgtatcgatcacgatggcagtaccacccttttcggattactgcggttttgtagtacgttttgaaattgggaagtgtgagtccttcaacttttttcttttctgagattgttttggctatctgagccccttacattttcttatgaattttaggatcagcttgtcagtttttacaaagaaggcaggttggattctgacaggcatcacgatgaatctgtatattgccttggagattatgggcatcttaacaatattaagtgtcccaatccgttaacacaaaatgcctttcgatttatttaggtcttctttaatttattttagcaacgtcttgaaattttcagagtatacatcttgtacacctttagttaaatttattcctcgacattttattgtttcgatgctactgtaaaatgaatcatttccttaatcttattttcatgttattcattgctagggtgtagaaatacaaccgactgttgcagattgatcttggatactgcaactttgctgagccgaatatgctttgctgagcatactcagacagggttggcatattagtccgttcctacactgctataaagaactgcctgagaatgggtaattcctaaagaaaagaggtttaattgcctcatggttctgcaggctgtacaaggcttctgcttctgggcaggcctcaggaaacgtgcaatcatggcggaaggcgaaggggaagcaagcaccttcttcacatgttggagcaggaggaagagagagagaacgcacgcaaagggggaagcgctgcacattttcaaacaatcatcagatcttgtgagcgctctatcagaagaatagcaagggggaagtccgcccccatgattcaatcacctcccactaggcccttccttcaacaggtggggattacaattcgacatgagatttgggtggggacacagagccaaaccgtctcagttttttttttttttcttttgttggactctttagtgtcctctatataagaacatgccatctatgcatctatgaatagagatggttttacttgttcctttccgatctggatgccttttatttctttttcttgactaattgccctgactagaactttgagtacgatgttgagttacaagtggcattcctgatcttagggggaaatcaaccagtctttcaccattaagtatgatattatctctgggtttttcatggatgccctctatcaggttgaagaagtttctttctgttcctggtttgttgaatttattttcatgaaagggtactgcgttttgtcaaatgatcctttttgtacatgattaagatgaccatgagccccctcccccgcccccgctccgccatgcattctgttaatatggtgtattatataaattgattttcacatgttgaaccaaccttacatttgtgggataaatcctatttggtcatagtgtataaagagtggtcaataaacatttcgttgaaagaataggagtggatctggcaagcttcttggaggacaatgtgtgtgttaaagaatctgtagcatgatgagaagccaaggcaccggtgggaggaggggagttgcaaccaattcattaaggctggagagtacgatgccagtggagcagtagtggttgatgtggctgggaaagaggtaggcaggagccaagacatggaggttctattatgccatgctcaggttttagaataccctgtaggctacactgaacccactgtggtctttcagcttgggagtgacgtggtctgatttgcctctagaaatatcaccctggaagctgtgtggagaatagaacagagaggattgtgtgtggagaatagaacagagaggactgagattggaattagaaagctgctgtattataccagtcaagaaatgacagatatctcaactaagacaatggcattggtagataagactaggggacagagtccataaaaagtttaggtagtaaaatggcacacagtagacactcactacatattactcatactggtgaacctagctggagacatgataattcatgtgctcattcttcaaaaaatattgaagggtagtgccaggtatactgtgttaagcattgagacaacaccaacgagaaatattctgttgtataaataggccacattttgtttatctactcatcagttgatgaacagttcattaaatgatttccatggcaggggaggtaaatgttgtcctctatcctcttagattctccagctaggacttaaataagatagattaacaaaagaaaagcatacaaaattttatttggcattttttacatgtacatgggagccctcataagaaatacgaagactcaagtgattaattacagctgaatacttacatactagggtgggaaaagtatggtaaattgtgaaaacataacaagacattggggtttgggctaggagagttaattgtggaaaagtcactaagaaggtaagagttgtgtaacaaggttttttggtgcagctttccctcaagcctggactccccatctctggcaataagaatgtgtttcttcttcctggtatacagataatacctttcacatcagagtttcatctcttcctttcatgaaaaaaaaaggaaggtcagtgtgcccttcttgcatctgctactttcaagtgcctttaaacacaaaataatcaatatgccaaagtggcatattttgaggtggcatttgatcccctacattactgattggatagtgtgaatagtgctgccatgaacgctcctgtacaagtgtttgtttgaacagatgttttaaattgcagacgctcctcaacttgggatggtattatatcctgataaacccattgttagttaaaaccattattagtgtaaattcatttaatacagctatattagtccattctcacactgctataaagaactacctgagacttggtaatttatgaagaaaagaggtttaatggactcacagttctgcaggcttaacaggaagcatgactgtgaggcctcaggaaacttacagtcccagcagcaggtaaaggggaagcaagcacgccttaccatggtggagcaggagagacagagagtgaaggacggaaatgtcatacacttttaaaccatcagatctcatgagaactcactcactgtctcaagaacagcaaggggaaatccacccccatgatccaatcacctcccaccaggcctctcctctgacacacggggattacaattcgatgtgagatttgggtggggatacagagccaaaccatatcagcggctaacctaccaatcatcataatttagccaggcctaccttaaacatgctcagaacacttacaattaggctacagttgggcaaaatcatataacgtaaagccaaatttataatgaagtgttgactatctcacgtaatttattcaatattgcactgaaagtgaaaggcagaatggttgtatgtgtactttaagtacttttatgcatatggattctactgaatgcatgttgctttcataccatcataaagtcaaaatattgtaagtccaaccattataagctgggaaccatccatatttgaggtacatacccatgaatatatttatgggtttatttcttgcttcttaattctattccatttatatatatgtctgtccttatgccagtaccacaaagcattgataactgtagctttatacgaagttttgaatttgggaaatgtgagttatccagctttgttattttttaggattattttggctatttgaggtcttgcacaattacacatgaattttaagattggcttttccatttctgccaaaaaaaaaatggccattgggattttgatgcagattgtattaaatctgtagatcactttgggtagtactatcatcttaataatattgtcttccaattcatgaacacaggatatattttcacttctttatgctgtctctaatatctttcagcaatgttttgtagttttcagtgtacaagtcttttacctccttagctgaatttattcctaagtattttattctttttgatgctattttaaatagaattattttttattttgttaatttcatctcagattgttcattgctagtgtgtagaaatacaactgatttttgcacgttgatcttatatcttgcaactttgctgaattcgtttattagctctatagtgttttgtggattcttcggggttttccatacataagctcatgttcatctgagaataagatagctttacttattccttttcaatttggatgccttttatttctttttttcctaattgctctggctaagacttccaatacaattttgaatagaagcagtaaaagcaggcattcttgtctcgtttctaatgttagggaaatatctttcagtcttctaccattgagtgtgatgttagttttgggtattttatgaatgctctttatcatgttgtggattttctcttccatttctagtttgcttagtggtttttttttttttttttttttttggtcatgaaaaggtgctcagctttatcaagtgatttttctgcatcaaccagaatgaacttgcaggggtttttttccctatattttattaatgtggagttgactgggggattgattgtcttatgttgaaccagtcttgcattattgggataatttccacttgagcatgggctataacctttataacatgctgctggatttggtttgctaatattttgttgaagatttttgcacctagatgcataagggaatattatactcacatattcaattacatgcaatttgtaattttcttttcttgtgatatatttgtctggctttgatatcaagatatggtggcctcatagtatgagttgtaaagtttactctccttttctgtctcttggaagagtttaagaaggattaatgttaatccttccttaaacatttagtagaatttaccagtgaggccttctagcacaatgcctggcacataatatatggaatctaggatttgtatagtcagtcattaactatttgttgaattaataaattgtctccccaagcaggtttctaatcaaggcacaaagattgagtaacgaatgaaggcaaagccaatgtatacagggtattagttttctaatgctggggtggcaaattaccacaaacttaatatggcttaaaacaacacaagtttattatcttacagttcgatagggcagaagactgacccaagtcttactgggctaaaatcaaggtgtcatcagggctgcatttctttctggaagctctagaaaaggatcctttttcggtcgcctgtagtcccagctactcgggaggctgaggcaggagaatggcgtgaacccgggaggcggagcttgcagtgagcggagatggcgccactgcactccagcctgggcgacagagtgagactccctctcaaaaaaaaagaaaaagaaaaggatcctttttcctttcttttccagcttctagaggccacacacattcattaactcatggcttccttcctccatcttcgaagccagtaacattgcacctttgtgactattcttaagtagtcacgtctccctttgactctcctcttctgcctctctctctcactttcaaggcctcttgtgattacattgggccgacctggataatccaggatattctccctattttgacatcagctaattggcaaacttaattccatctgcaaccttaaatccctcttgccatgcaacataacacagtcaaatgttctggggattaaaatgtggacatcactgagagatcatattcttcctagcacatacggtttagtcacaagttaatgatcaacatttattagctatataatactcttaagttcaacataaactttttggatgctgataaaacggaatggcattttacattgatatatacttcatttcaaaacttcttctacttctcaatgattattctgtagcaacaaatttcttttaaatcagaaatttggaaacataacgagacctatctcaaatcaaagatgactatccccttttggagtcagactacacattcattattttagtcaaaatgagacataaaattcaggcccccaagagctgccagtacccacttacgcaggaggtagctagacgaaacaggtagctttctacaaatgattttgcaccatcccaccccagagaggtggtttggagtgtttacttattacctgggatttaattatactagctcttgcaaaagccaaatctaaaggccataaatagaaggtcaaattttctcctatatagaaaggagagcagcagagaaaacaaaatccttggtaaatctttaaacaaagttatatggtttgaatatgttattcattctattttaaccccccaatacagatatatttataaaaaagaatattgtgatttctggtataacttgtttaggaacaaagccacaaatttattaatattttctattccctgggaagaaaaaaatgctacatggcagaataattttttaaaatttccagccgggcacggtggcttatgcctgtaatcccagcactttgggaggccgaggtgggcggatcacaaggtcaggagattgagaccatcctggctaacacggtgaaacaccgtctctactaaaaatacaaaacattagctgggtgtggtggtgggcgcctgtagtcccagctactcgggaggctgaggcaagagaatggcgtgaacccgggaggcggagcttgcagtgagccgagatcgcgccacggcactccagcctgggcgacagagcgagactccgtctcaaaaaaaaaaaaaaaaaaaaaattcccatgatactaaactgatgtgtgatcatataatagacttacactgatacctattttagtgtattcaagcagataaaaaatcccaggtgttctatgagtgatatcattttcagtatttcttatgctgtatgccatggtttaaatctaggcctttcgaattggcattactaccatatttctcaaactgtattccctttctcttgaatatgttatgtaattttgtccagaacccagacatgtcaaggtgtcaaatcccacgttttggatactaacgtgtctcattaattcatacagtgggatcattcattaatgcccacattatagactctctctctctctacacacacacacacacacacacacacacacacacacactacattcttagaagatcattctgagaccagggtggaggataggctgtgcattcccagtactctttcacagctgactgtgtcctctgccagtgttttcaaactttactgcttatgaaacagctaagggtcttattaaaatttagattctgattcagtagaactgacatggtgcccaaggaactgcatctcttttaaaaaatctttatttaggtataattgacaaaagttgcatatatttaagaggtacaacttgatgttttgatatattttgtttttcatatatgatgtttgatacattgtgaaatggtcaccacaagcaagctaattaagatatatctatctctttgcctagctacctttttttgtggtgagaacatttatgacctactcttttagcaaatttcaagtatacaatattgtttactatagttactatatcgtacattagatctccagaactaatttatcttgcataattgaaattttgtaccctttgatcaacatctccctgtttcccccacaccacagtccctagcacctaagattctactgtctgcttttatgagtttgaccatcttagattccacatatgaggtcatgaagtatttttctttcagtgtctggcttattacacttagcataatattttccaggttcatccatgttatcacaagtgggaggattttcttctattttaaggccaaataatattttataattgtgggaatattccatcagatatatatatatcagattgtctttatccctccatccatcaatggacacacttaggttgtttccatatcttgactattgtgaatactgttacagtgaacatgggagtgcagatattcaacatactgattttgtatcctttggatatataacagaagtgagattgccagatcacatggtattcatttttagtttttttgaggaacctctatgctgtttttcataatggctgtaccaatttatttttgcagcaacagtgtacaaaggtttccttttctccacattaccaccaacatttgtcatcttttgtctttttgataatagctatttgctatggtttgagtgttttccccaaaaaacatgtgttggaaacttaattcccaatgcgacagtgttgggaggtagggccgaatgggagatgtttaggttatgaggactccaccctcatgaatggattaatgccgattacaaaagcacctaaggctgtgaatttgaattgctctctcttgccctctttttgcccttctgccatgttatgatatagaaagaaggcctttgccagatgctggcctcttgatcttggactgcccagcctccagaactgtgagccaaatacatttctgttcactacaaattactcagtctgtggtattctgtcatagcagcataataaattagagtccataataagttatagtccataacagactaagacactattctaatagatgtgagggaatatctcattgtgttttgatttgcatttccctgtgggttagtgatgctgagcatcatttatctgttggccttttatatttcttcttttgaaaaattctatttgggttctttgcccatttttaattgggttgtttcttactaatgagttgtttgagtttcttacccattatcagatatacagtttgcaaatattttcatccattccataggttgtcttttcactctgttgattatttcttttgctgtgcagaaagtttttagtttaatgcaatcccagtttctatttttgtttttgttgcctgtgcttttggtgtcatataaaaaaattattgcccaaatcaatatcaggtagcttttttcctgttttcttctaggagttttatagtttcaggtcttatatacaagtgtttaatcaattttgagttgaattttatgtatagtgtgagaaaagggcccaatttctttcttctgcatgtggatattcagttttcccaatatcatttattgaagagactctcttttccccgttgtgtgttcttggcacccttgtcaaaaatctgttgactgtaaatgtgtgaacttatttctgggcttttctattctgttcccttggttgatgtgtctatttttatgccagtaccatactattttgattactggagacttgtagtatattttgaaatcaggaagtatgatgcctctagctttgttcttcttgcttaagattgctttgccaggctgcatgtggtggcccacgcctgtaatcccagcactttgggaggctgaggtgggtggatcacttgaggtcagaagtttaagagcagcctggccaacatggtgaaaccccgtctctactgaaaaaatacaaaaattagccaggtgtggtagcaggcccctgtgatcccagctaatctggaggctgaggtggagaatcacttaaacctgggaggcagaggttgtagtgagccaagatcgcaccactgcactccagcctgggcaacagagcaagactctgtctcaaaaaaaaaaaaaaaagattgctttgcctccttggggtcttttgtgatttcatattaattaaaattttttttttatttctgtgaagaacaccattgagattttgatagggatcacatcaaatctatagattactttgggtagtgtggacattttaacaatactaattcttccaatctaggaatatggaatatcttttatttatctgtgtcttctttaatttccttcataaatgttttctatattttcattgtacaagtctttcatttctttggttaagtctattcctaagtattttattcttttgttgctattgtaaataagattattttctaatttcctttgggatattttatagtgtatagaaacaccactgatttctgtatgttgattttgtatcctgcaactttacagaattcatgtattagttctaacaatttttttttgagtctttagagttttctacatgtatgatcatgtcatctgcaaaaagagataattttactattctcttctatttggatgctttttattttatttattttttaaattatattttaagttctgggttacatgagcagaacatgcagttttgttacataggtatacacgtgccctggtggtttgctgcacccatcaacccgtcacctacattaggtatttctcctaatgttatccctcccctagccccccaccccccaacaggccccagcgtgtgatgttccactccctgtttccatgtgttctcattgttcagctcccacttatgagtgagaacatgcagtgtttggttttctgatcttgtgatagtttttgagaatgatggtttccagcttcatccatgtccctgcaaaggacaggaactcatccttttttatggctgtatagtattccatggtgtatatgtgctacattttcttaatccagtctatcattgatggacatttgggttggttccaagtcttcgctattgtgaatagtgccacagtaaacatacatgtgcatgtgtctttattgtagaatgatttataatcctttgggtatatgcccagtagtgggatttgctgggtcaaatggtatttctagttctagatccttgaggaatcgccatactgtcttccacaatggttgaattaatttacactcccatcaacagtgtaaaagcgttcctatttttccacaacctctccagcatctgttgtttcctgactttttaatgatcaccgttctaactggcgtgagttggtatctcattgtggttttgatttgcatttctttaatgaccagtgatgatcagcattttttcaaatgtctgttggctgcataaatgtcttcttttgagaagtgtctgttcatatcctttgcccattttttgatggggttgtttgtttttttcttgtaaatttgtttaagttctttgtagattctggatattagccctttctcagatggatagattgcaaaaattttctcccatcctgtaggttgcctgctcaccctgatgatagtttcttttgctgtgcagaagctctttagtttaattagatctcctttgtcaattttggcttttgttgccattgcttttggtgttttagacatgaagtctttgcccatgcctatctcctgaatggtattgcccaggttttcttctaggatttttatggtcctaggtcttacgtttaagtatttgatccatcttgagttgatttttgtaaaaggtgtaaggaagggatccagtttcagttttctgcatatggctagccagttttcccaacaccatttattaaatagggaatcttttccccattgcttgtttgtgtcaggtttgtcaaagatcatatggttgtaactgtgtggtgttatttctgaggcctccattctgttccattggtctgcatatctgtttggccccagtaccatgctgttttggttactgtagccttgtagtatagtttcaagtcaggtagcatgatgcctccagctttgtccttcttgtccaggattgtcttggctatgagggctctttgttggttccatatgaagtttaaagtagtgttttccaattctgtgaagaaagtcagtggtagcttgatggagatggcattgaatctataaattactttgggcagtatggccattttcatgataatgattcttcctatccatgagcatggaatgtttttccatttgtttgtgtcctctcttatttccttgatcagtggtttatagttttccttgaagaggtccttcacatctcttataagttgtattcgtaggtattttattttcttagtagcaattgtgaatgggagttcactcatgatttggctctctgtttgtctgttattggtgtataggaatgcttgtgatttttgtacattgattttgtaccctgagactttactgaagttgcttatcagcttaaggaggttttgggctgagatgatggggttttctaaatatacaatcatgtcatctgcaaagagagacaatttgacttcctcttttcctatttgaataccctttattgctttctcttgcctgattgccctggccagaacttccaatactatgttgaataggagtggtgagagagggcatccctgtcttgtgccagttttcaaagggaatgcttccagtttttgcccattcagtatgatattggctgtgcgtttgtcataaatagctcttattattttgagatatgttccaccgatacatagtttattgagagtttttagcatgaaggggtgttgaattttatcgaaggccttttctgcatctattgagataatcatgtggtttttgtcattggttctgtttatgtgatggattatgtttattgatttgcatatgttgaaccagccttgcatcccagggatgaagccaacttgattgtggtagataagctttttgatgtgctgctggatttggtttgccagtgttttattgaggatttttgtatcgatgttcatcagggatattggcctgaaattttctttttttgttgtgtctctgtcaggttttggtatcaggatgatgctggcttcataaaatgagttagggaggattccctctttttctattgtttggaatagtttcagaaggaatggtaccagctcctctttgtgcctctggtagaatttgtctgtgaatccgtctggtcctgtactttttttggttggtaggctattaattactgcctcaatttcagaacttgttataggtctattcagggattcaacttcttcctggcttagacttgggagggtgtatgtgtccaggaatttatctatttcttctagattttctagtttatctgcatagacgtgtttatagtattctctgatggtagtttgtatttctgtgggatcagtggtgatatccccaatatcattttttattgcatctatttgattcttctctcttttcctctttattagtgtggctagaagtctatctattttgttgattttttcaaaaaaaccagctcctggattcaatgattttttgaaggtttttttgtgtctctatctccttcagttctgctctgatcttagttatttcctgtcttctgctagcttttgaatttgtttgctgttgcttctctaattctttaattttgatgttagggtgtcaattttcaatttttcttgctttctcttgtgggcatttagtgctgtaaatttccctctaaacactgctttaagtgtgtcccagaaattctggtacgctgtgtcttcattctcattggtttcaaagaacatctttatatctgccttcatttcattatttacccagtagtcattcaggagcaggttgttcagtttccatgtatttttgtggttttgagtgtgtttcttaatcctgagttctaatttgattgcactgtggtctgagagactgtttgttatgatttccattcttttgtatttgctgaggagtgttttacttcgaattatgtaatcagttttagaataagtgtaatgtggtgctgagaagaatgtataatctgttgatttggggtggagagttctgtagatctctattaggtctgcttggtccagagctgagttcaagtcctgaatatccttgttaattttctgtctcattaatctaatattgacagtggggtgttaaagtatcccactattattgtgtgggagtctacgtctctttgtatgtctctaagaacttgctttatgaatctgggtgctcctgtattgggtgcatatgtatttaggatagttagctcttcttgctgcatttttccctttaccattatgtgatgctcttctttgtctcttttggtctttgttggtttaaagtctgttttatcagagattaggattgcaactcttgcttttttttttgctttccatttgcttggtaaatattcctccatccctttattttgagcctatgtgtgtctttgcaagtgagatgagtctcctgaatacagcatactgatgggtcttgactctttatccaatttgccagtctgtgtcttttaattggggtatttagcccatttacatttaaggttaatattgttatgtgtgaatttgatcctgtcattatgatgctagctggttgttttgcccattagttaatgcagtttcttcatagtgtcaatgttctttacaatttggtatgtttttgcagtggctagtaccagttgttcctttccatgtttagtgcttctttcaggagctcttgtaaggcaggtctgatggtgacaaaatccctcagcattcggttgtctgtaaagaatttcatttctccttcacttatgaagctttaagaggtttaattgactcacagttctgcatggctgtcccataagtcccatgttctttcctcaggaaacctacagtcatagcagaaagggaaataggcacatcttacatggcagcaggcaagagagagtgtgtgaaggaggaactgtcaaacacttataaaaccatcagctctcataagaactcactatcaggagaacagcgtgggggaaaccatccccatgatccaatcacctcccactaggtccctcccttgacatgtgggcattatggggattacgattcaaggtgagatttgagtgggaacatagagccaaaccatatcagtatctaaaaggaaaaaccttcagtttttccacatttggttatgatatcagctgtgagcttttcctatatggtctttattgtgttaagttccttctgtatctatcttgctgaaagtttttattatgaatggatatctagttttgtcaaattctttttctgtattgatcgaaataatcatgtgtttttcatctttcattctgataatgtggtatatcacattgattgatttgcccatgttgaaccatccttgcatcctagggataaataccacttgttcatgatgaatgatccttttaatgtgctgttgaatttggttggctggtgttttgttgaggatttttgtatccgtgttcatcagggatattggcctgtagttttctttcttttcttttcattttctttttctttctttttttttttttttttttttgagacagagtcttgctctgtcacccaggctggagtgcagtggtggtatgatcttggctcactacaacctccacctcctggattcaagcgattctcctgcctcagcctcctgagtagctgggactactggaacatgccatcacacccagctaatttttgtatttttttagtagagatgagttttcaccttgttggccaggctggtctcgaattcctgacctcaagtgatttgcctgcttcagcctcccaaagtgttgggattacaggcttgagccaccacacctggcctggcctgtagttttcttttctagtgttgtttttgcctggatatggtatcagggtgatgttggctaataaattgtattttgaagtgttctctcttgtattttttggaagagtttaagaaatactggtattaatacttcgttgaatgtttgatggaattcatccatgaagccattggtcctgggcttttctttgttggaaggtttttgattactagatttaatatccctatttgttgttagtctgttaaggctttctatttctttgttattcagttttggtatgttatatgtttctaggaatttatccatttcctctaggttaaccaatttgttgacacttataatagtcccttatggttctgtctgtttctgtgacatcagttgtagtgtctcctctttcatttatattttatttatatgagtcttctctctttttttcgtagtctagataaggacttgtcaattttgtttattttttcaaaaaaatcaactcttagttttgtcagttatttccaattgtttttttattctcttttttatttatttctgctctagcatttattatctcctttgttctgctacctttgggcttagttttttttttcttctttttgtagttcctggaggtgataagttgggttgtttatttcatatgtttcttctttttaaatataggcatttattgctataaatttccctattagtatgcttttactgcatcctttaagttttggtatattatcaagattttggtttcttctgtgacccaatggtcgttcaagaatgtgttgtttagtttccacatatttgtgaattttcgtgttttcttattgttattgatttgtagtttcaatccattgtggtcagaaaatatacttggtatgatattaatcttcttaaatttattatgacttgttttgtgacctgaaaggtgatctgtcctgaagaatgttttgtgtgtgcttgataattctactgttgggtggaaagttctgtatatacattttaggtccattgggtctattttattcttcagttctgttttgtccttattgattttctgttgggatgatctattcattatagagagtggagtattgaagtcaactatattatattgttatctatttctccttccatgtctgtcaatgtttgctttatatatttaggtactttcgtgttgggtacatatatatttataattattacatcttcctgttcaagtgacccttttattatataatgaccttctatgtctcatgtcacagttttttacttaaagactattttttctcatacaagtatagccacccctgctctcttttggttacagtttgcatggcataactttctccaccccttcactttcagcctatgtatgtccttaaatcaaaagtgagtctgttatcaacaacatgtagttgggtcctgtttatttttgtttcttacttcccatctctgaattgttggctttttaaaaagcccattcagttactctgtgtcttttgactggggagtttagtcaatttacacttaaagtaattattgataggttaggactttctgttgccattctgttaatagttttctgttttgtagttttcttgttcctttcctctttttctttctttgtggtttgatgatttttgcttggatgtgttttgattcttttctctttatcttctgtatatctactgtgtgggggggcggtcgggggggttaccacagggatcaaattgaacactttatagttatggcagtctgttttaagctgacaacaccttcaatcacatacagaaactctatactttactcattccccccgccacaactttatgtaatcgacgtcatattttacttccttctatattgtgtttccattgacaaatttctgtcactatagttactattactatttttgtcttttaatttataaattaatattaatagtgatttataacaatcattatagtgttacaatagtctatgtttctctttatatttacctttagcagtgaaaggattcatatgcttttgtgttactgttttttttttatttcaacttgaagaactattagcacttcttataaggcaggtctcatggtgacaaaccccctcagtttttgtttgagaaaggctttatctttgtgttcattcttaaaggacagtttttccagataaagtattgttgattggatttttttctctcagtactttgaatatatcatcccactctttcctgacctgcaaggtttctgctgagatatccactcatagtcttatggagctcccctataggtgacaattcactttcttcttactaccccaaaattctcttttgtctttgttgaaaatttaattataatgcatctcactgtagacttctgtgggtttaatgtatttggttatctttgggcttaatgaatccagatggcacttcccctccatagatttggggagttctcacctattatttctttaaataagtttcctttctctctctcttctccttttaagatttctataatgcatctatcattttgcttgatgatgtcccataagtcctctgttcttccttcactctttctcattgttctttttattccgctaactagataatttcaaatgacttgtcttcaagtttacaaattctttcttctgaatgattgagtctgctattaaagatcgctattaaattttttagttcagtcattcttcagctatattcagcaatattctttagctacaggatttttatttggttcttttttatggtttttatttctttattaaacttctaatgttgttcatgtattgttttcctcattttgttagtcgtcttcctgtatcctcttgtagctaattgagcttctttaaatgattattttgaattctttgtcaaaaatttcatgaatctccatttcttcagggttggttactggagctttattagttccctttggtgatgtcatatttgcctgattcttcatgatccacatagcctagcattggtatctgtgcattggagtgagctgacacctcttctggtctgaagttgggtactcagacaatgggcccattaccagggctttggataggtgtagctctcactgggtccttgagtgggcaggactgcctgcagaccatgatgcagtgggcctggagctgggtcaaagggctgcttcagggtccccacttgggcccacagtcagtgggcctgttatgggggcacaggtaagtgtggattcaggcaggactgtctccagaacatggtacagcaagactggagttggctcacagggttacttctgagtccacagtcaggtctagttggtgggcctgcttccagaggtggactggcatgactcccacctgtttcctaagtaggcaaaacttccccaagaccatggtagtgtggtactgaagctgctttaggtacagggctgcttcagagtccacagttgggagccctgttactggggttgccaatgggagttgctcctcccagattcctgggcagatagggatagtggtaggaccacatacaaacaactctggagctaagtccccagggtggtgggctgcttctgggtccacaaccagaactacagttgacaggcctgccgctagaatgtgggcctgccttattaaagtattcatctttgttcttgagctctaccagggtttctcaacctcctacctgaatcccaaggctcccacaaagacacttttgtccatagatcattgtcaaattattgttcctgtgggggaacaagagctagggacctcctatcccatcaactcactgataccgttctcctgatgctgcattttgaattgccctcaggtgatgctgctactcctggtctgtggaccatgctggagtagcagagcccaaatggcttcctcaacttttatgagccttttacaggaactcaaagtagaaaataacttcacttgccccagacctaataatttcctttgttcccacttcttcttggtgctttcctcctttgtgtctaccatcgtaacatccatctaaccatagttgtcttatgtagatgttggatgctgttgagaaacgcacaaagcaaattagaaggaagatatgattgacagaaattgctttttactctgtattcactttccatgtatttgtgctaatctctccatacaggtcttctttggcaatgtggattcatctgggataaaacacaatatttttaaccctccaattattgctcgatacatccgtttgcacccaactcattatagcattcgcagcactcttcgcatggagttgatgggctgtgatttaaatagtaagtgccaagtcatcccatatccttcttccctcaaccatgggtagggtgactaactgttctagttatcctgagactgggggaggggttcccggtatcaggacacaaaattgtcagtgctaaaaccagcatagtcctgggcaaacccagaaataccattcaacccagcagtcccatcactgggtatataatcaaaggaatataaatcattctgtcataaagacacatgcacgcatatgttcatttcagcactattcacaatagcaaaggcatggagtcaacctaaatgcccatcaacaacagattggataaagaaaatgtggtacatacataccatggaatactatgcagccataaaaaagaatgagatcatgtccttttcagcaacatagatgcagctagaggccattatcataaatgaactaatgcaggaacagaaaaccaaatatcatgtgttctcataagtgggagctaaacattaaatgcacatggacacaatgatggacactcaggaggggagaggttgggaggggggtgtgggttagaaggttatgtattgtgtactgcactcactacctgagtgaggggatcattcatacaccaagcctcagtgacatgcaatttacccatgcaacaaacctacccatgtacccctagaatctaaaataaaagtagaagaagaaaagaaacaaagaaaattaaagagtcacacaaagtgggaagagctggctggaaaacagatagcaataacagaattggccgggcgtggtggctcacacctgtaatcccagcactttgtgaggccaaggcgggtggatcacgaggtcaggagatcaagaccatcctggctaacatagtgaaaccccaactctactaaaaatacaaaaaattagccgggtgtggtggtgtgcgcctgtagtcccagctactcgggaggctgaggcaagagaatcgcttgaactcgggaggcagaggttgcagtgagctgagatcatgccactacactccagcctgggtgacaaagcgagactccatctcaaaaaaacaaaaacaaaacaaaacaaaacaaaaaaccaataacagaatctgtgcaaaagttaaaacctgagaaatgatattatgatgacagtagccctagaatatcagtggaagctgctcagtataactgaggctgaagcatgtccttgtgataaccttcttttttcttttctttgaggttgcagcatgccattgggaatggagagtaaagcaatatcagatgcacagattactgcttcatcctactttaccaatatgtttgccacctggtctccttcaaaagctcgacttcacctccaagggaggagtaatgcctggagacctcaggtaagaggcaacagatttactgtttaactgactcagagcagtggttggggaaaaaatcggggaaggccttgactgtttcttctgaggtatttctgtcaactgttagttctaaaaagtgtgtcaaggaagtttggttatgggcagacaaccacacaggcatttgggggaaatgatctctaattgaacctcctggaagaagaatctctatatctagtactgagctaatatctgtcaaagaattgtagaagctaaagtccattttacagataaatatcaacaattagctttctttccaggtttctcattacatcaatgaaaagtaaacatttactgcacatcttagtatccctaggatgagcctagggatacaaaggtgaattgtgaaaaattttggccctgaagttgcttagagttgaataagagagactgactagccaatagaaagtggaggctgggtgcggtggctcatgcctgtaatcccagcactttgggaggctgaggcgggccgatcacaaggtcaggagttctagatcactcttttgctgaggcaggataatcgcatgaacctgggaggcggaggttgcagtgagctgagatcatgctattgcactccagcccaggcaacagtgcctgactctgtctgaaagaggcagagagagagagagagagaaagaaaggaaagaaggaaggaagaaaaagaaagaaaggaaggaaggaaggaggccgggcagagtggctcacgcctgtaatcctagcactttgggaggcctaggtggcagatcacctgaagtcaggagttcaagaccagcctggccaacctggtgaaacctcatctctactaaaaatataaaattatctggacatggtggtgggcacctgtaaccacagctactcgggaagctgaggcaggagaatcggttgaactcgggaggcagaggttcagtgagctgagatcatgccattgcactacagcctgggtgacagagcaagactccgtctcaaaaaagaaagtagagtgagaagtgctgtggtatggttaagagggatttgggaatttctgggagtaaatggtgaccaagaggctactagtccaactctattgccctcaggtgaataatccaaaagagtggctgcaagtggacttccagaagacaatgaaagtcacaggagtaactactcagggagtaaaatctctgcttaccagcatgtatgtgaaggagttcctcatctccagcagtcaagatggccatcagtggactctcttttttcagaatggcaaagtaaaggtaagctggtctccttggaaagaaagaaagaaagaaaaaaaataccacctctcctagagcttaacataacataaaaaggttgatatatgaccaaattttcagagcaaaatttattaagtacctatggtagcaagacattgtaaaaggcattctgagagaacacagtgactttaagaaaaaggtaaaatactgagaaaagggcagagtagatccaagagttaattctcctcatcagcaccttgattcccaagcctttttgacctttaagtttagtggtccaggaagtcttcattcttaatctgggtttgctggataattcaacaaattgtcctgattaaaagacatgacataaagtcttatcaccccatgagtaatgggggaaggaatagttcctctctttggtattttttatattcttttttcaccaagaattaaccatgatgtggtccttaccaatctctctaatacagtctcttgccacttggctctttaagctccatccatactaagaaattctcaggtcactaaatacagccattatatctcataccaggcttttaaatagatactatttcttctacctggaacatttttctagctaccctctactgccactttcacctgactcattcgttaagtctcaggtaaacatcatgtccaagaagaattcccttatccatcaaggctggatgaaagacttcaccaaactggcagtttggtgaactgaagtctagacattggatattctagaagaaaaattcccatttaaaaaaggttatatctctgattagtgccacaacatgatgaactttcaaaatatgctaagtgaaggccgggcgcggtggctgatgcctgtaatcccagcactttgggaggctgaggcaggcagatcacgaggtcggtaaattgagaccatcctggctaacacagtgaaaccccatctctactaaaaatacaaaaaattagccaagcgtggtggcgggtgcctgtagtcccagctactcgggaggctgagacaggagaatggcatgaacccgggaggcagagcttgcagtgagccgagatcgcaccactgcattccaacctgggcaacagagtgagactccatctcaaaaaaaaaaaaaaaagaaaatacgctaagtgaataggccagacataaaaggatagatattatatgattctacttatatgagtgtgttagtcagggatatccaaagaaatagaaccaataggagattctgtctgtctgtctctctctctctgtctctctggatgagctaaactgttttagttcaagactgaaagcaggaaaaagctgatgttccagtccaaaggcagacaggcagcaagaatactttcttacttggggaagactcagtctttttgttctattcaggccttcaactaattggatgatgcctcccacattagggagagcaatctgctttactcagtctactgacttcgatgttaatcccattcaaaaacaccttcacagaaataaccagaataatgtttgagtaaatatctgggcaccttatgaccaagtaaagtagatacataaaattaaccatgacaagtccaccccttgtcaatgtagcacccatcatacacatctcctttatctctaagtagagacaaaaatgaggtcataattccacctaacatgatataacaaaacttggctggtattgataactaccttcttctactacccattctgtattgactttgccttcagcaagcatctcagctgattgtggttctttacctgatgaggtgacccaaacctttattcctgaagagcctgggccactagtagtcctgcatggattgggttgctgtagtttcccattgaccagaatcatagggcctggtaatactaagagacactctaagggatctattgtattccagacacactcttccatacctccattgtgaagcagtagttcagtttccttccaggaaggacaaaacgctgccccttccatgatgaacatattccaatgtaatcaacctgctgccagatagctggctgatcatcctgggaaatactgccatactgaggactctgtgtttgtctctactgctggcagattgggcacttagcagtggccatagccaggtcagccttgttgaatagaagtccatgttgctgagcccatgcatagcctctatccctgccaccatggctactttgttcatgagcccatcaggcagtgacataggtggctgagtaaaaaggatgactggtatccacagaacaggtcatcatatctactttttttttgagatggagtcttgctctgttgcccaggctggagtgcagtggcacaatctcagctcactgcaacctctgcctcccaggttcaagcatttctcgtgcctcagcctcccgagtagctgggactacaggcacgcatcaccatgcctggctaatttttgtatttttagtagagacagggtttcaccatgttggccaggctggtcttgaactcctgacttcaggtgatcctcccgccttggcttcccaaagtgctgggattacaggcgtgagccactgcacccggcccatcatatttacttgattattgaaatccttatctgctgaggtcacccttcgttgagcactcacatgggacataaatatattcacatcctttgcccattcagagagatctgtccacatacctcttccccaaatttctttgtcacctgttttctaatcatgttccttccaagtccctatctggacaaagcactgactacagcccattacttgacatataattgcacacctggccatttctccttctaagcaaagtccacaaccaggtacactgcctaaaattctgcccactgtccttcatgggtatctcagatcgggactgtccacttttgtgtagtacctgcatatcgtgcagaaccgtctgtaaaccaggcccaagactcctcttcctctgtaaactgatcatagggaactcccaatggggccataagtgcaggctgggagagagaaggcagggtagcagaaacaggcaccatggacatttgggctacttcttcatgtaatttacatgtgttttcagtacctgctcagacatgatcatgtatataccacttccatttgatgatggagtgccattgttcatacccaactttatggcttggtgggtcagataacacctagttcatgatgggcagttcaggtcacatggcaacttggtggtctgtggctaagcattcagtatctactaaggcccagtagtaggccaagagctatctcacaaaaggagaacagttattcacagaggattacaggaggatttctcactacagtagcccctgctccataggtcagggaaccaatgtgaagatcctgctagctgctcaatatatctgttccaattacgcattccaggactggggaaataaccacaagatagtctcacagatcctctgcatccactttgagatggacttgagctaaaattccattgatcatttgaccctccataagcccatactctgactggtggaccacagtgacattttgggtctcctgaaattagtgccagttcagagccattgtccagtagtccctgaaaggtctgattaattatttttcttcagtgcacatttattctgatagaaaggccatatgtccctttggggaaggctgagagaaagagtggcagtattcttggcagtgtaccagagtccttcctcaaggagactgagcctccccttcattcaaggagtgctgggtctgtaaacctgctcaagtctgggaattgattgagaggccgtgactctgtttttattattcaggttagacttttgttcacttgacctagaacttttccacttatgcagttcaagaatttggtaggcattctatctatatcacatctaggaacactataatctactagccaacaccataggtctgtgcaagtcatactattctaactgctgctttgactctgctgtcccttatggtaaccacacttaccttgcctttggcagttgagtgctgcccattggccccttccaccccaggatccaattattcccattgtatttaggttttctaattcagtgactgcaggtcctgctgtaaggtgtcacctacagagaagagtgatcacagagcccttcaaggatgctgaggttcccctcacaaatttattcctcaaagtaatagtgagatctgtgtcttctgaactctcccagtgttggtgagtatgtcttaaatgacaaattcactctagcatttcaatctcctttcttctacattaaaccagggcaagtctgaaatttctagtttgctcactgtgggccatcttttggtctgtgtttcagccaaccaattaaactgttagaggccttcctaattccctgagatgcaacattaagtccagaatctctgcttagtgggcccatgtcaataaatttggcctaatccaactttacgtgccttccaccgttatctcacatccttagtacccattcctatacatattctctggattcctgcttgtgtaaattagaaaactcaagtcatgattttggagtgtagtgcaccttgtcatgggtcaccttcatacctcacctcgcctgctgggacttgagtgtagttatagatctaataacaaagaggggtggtagggtgggtcctgaaggaatcagcattatcttgcatggcagttgcctcaggggaagccattacagtttcctcaggcagtgcagggttaatccacttagactggagtagagatactgccaccacagggctggagagaaaactttcactgacaaagaagactcatcaatatttaggagctcaatgtccccagcttaatcagggtcttccacacatacctaatccaacttgtagtgccccattctttcccaatcactgcccttgctttaacagtagacaccctgcaaagctgggagtttggcttgctttgtaattcagttagtcacaggatgagatttggcatttgattttcagcaatctcagctctgtggctacagtagataagggtctccttcagggcatacatagaatctgtcaagtcatttatgcagctcttgagctgggaattcaaattcctgagctcctccttttctttcatcactttttccagcaacattaggagcaaccgactaatcccatcatattcattagtttgacaaatatgttcacaagtgtcaatatacatagtcaccaagacccttgcttcttaaaagtagttgattaggagtatccaatggagatattttgcatatacatattttttgagatggagtctcgctctgtcacccaggccggagtgcagtggcatgatctcagctcactgcaacctccatctcccaggttcaagcgattatcatgcctcagcctcccgagtagttgggattacaggcacctgcctaatttttgtgtttttagtagagacagggtttcatcatgttggccaggctggtctcgaactcctgacctcaggtgatccatccacctcggcctcccaaagtgctgggattacaggcgtgagccaccgcgcccagcctggcctacatatttctattgccagatcatgccatggacaatttttactactgaaaatagtcattagtgtctttaaatttcatcaggttacagaaccaattccagaaatccaataacaaatttataaaatttatccttaaaattctgttcctttagaatcactcttggtgtgaaaatctgtattagtcatggttcccaaagaaacaaaaccagaaccaagaggagatacatacacacacacacacacacacacacacacaaggaattagctcatgtgattatggagtctgccaagtctcaagatctgcagggtgagttggcagcctagagaccccagagagctgattcgtagttccagttcaaagaccagcaggctacagacccagaaagagttaaaatgttttagttcgagcccaaaggcaggaaaaaaactgaagtcccagtttaaaggtagtcaaatagaaggaactgtctcttactaagaggacagtaagcctttttgttatatttaggccttcaactgattggataagttctacccacactggggagaacaatctgctttacttagtctaccaattcaaatgttaatctcaccaaaaaacactctcacagacacacataaaataaagtttaatcaaatatatgggcaccccatggcccagtcaagttgacacataaaattaaccaccataatgaggtatctagagcaggcaaattcataaagacagaaagtagaaaagaggttaccagggtcttggaatggggaagaaatggagagttatttttaatgagtacagagtttctgtttggggtgatgaaaaagttctggaaatggatagtggtaatgggtgcacaatattgtgagtatacttaataccactaaattgtacacttaaaaatgattaaaatggtaaattttatgtatattgtacaacaataaaaaaggctatatcactgacaatgcattgttgtatttagcaaagaaaggggaatctccagcctccccatcaacaaaaacccccacaaacttctattttaaaataatgagctgaaatcatagcggagaggtgaataatgagcaaatataaaaaggaagacctttcctcagacagaatgcccatattaatgttgttactggaagactaagccttgagcaaaatgcaaggagaactcagtgtgagaattctgcattgtcatgaatcccagaaggaagctagagaagttgcagataaatattatcctctggcacctggaagaaccattctcaacctactctagaaaaaaagcacctccagtttaggcctccaggattcctacatattaaaattataagatcacagacatagatcagcaaacatgcaagacaacaagacaacttgagtacaagtgaacagaaacaatcaattcagatttaaaacttgaagaacaccagatattgacattatcggatacataatatgaaataattatgtataaaatctttaaagtaataacatatggaaacatgaaaataaaagacaaattatccaacattattaggcagttgaaaaaaaccattgcaggttacaaagtcaacatgcaaaaatcaattgtatttttatatactaacaattacaaatatgaaaaggaaaacagaaaagtctatttacaatagcatcaaagataatacaatatttaggaataaatttaacgaaggaggtgcaagtcttgtccactaaaaacaaaaaaacccagttgaaagaaactaaagaactgtctggtctgaagacagcaaatatggaaaattagcaactagaaaaaaattaaaaattaaaaattaaaagagaaattaaataactaaataaatgaaaaggcatcctggatttatggatttgaagacataatattcttaagataagaatattaccacaaaccatttgcagattcaaagcaagcattctgggtttttttgtttgtttgtttgttttttgatttgagacggagtctcactctgtcgctcaggctgcagtgtggtggtgcaatctccactcaccataacctctgcttcctgggctcaagcgattctccggcctcaaagcattctctatcagaatcccaaagacatttttttttttgaggaatagaaaaatctatcctaaaattcagatggaatttcaagggaccctgaatagccaaaacaatcttgaaaaagaacaacgttggaggagtcatacttcccaatttcagaacttactacaaagctacaagaatcaaaacagggcagtacttacataaatatagacacatagatcaatggaatagaattgagagtccagaaataagcctatacatctatggtcaattgattttcaataaaagtgccaagaccattttgtgggaaaagaatagtctcttcaacaaatggtgctgggacaattggatatccacatgcaaaagaatgaagttggatctttaccatatacaaaatttaactcaaggctggatgtggtggctcacatctgtaatcccagcactttgggaggctaaggctggtggatcacttgagctcaggagtttgagaccagcctgggcaacacagtgagactctgtatctacaaaacaagaaaaaaaaattagctggcatgatggtacacacctgtagtcccagctactagggaagctgggataggaggatcgcttgagcccaggaggtggaggctgcagtgagccatgatcgcaccactgcactccagcctgggtgtcagagcaagaccctgtctgtaaaaaatcatttaactaaaaatgtatcaaaaaactaaatataaaagctaaaaccataaaactgtaagaaaaaacaaagaggtaaattgttatgatactggatttggcaatggtttcttagatgtgacaccacaatcacaagcaacaactctataaaaatatatatagtaggcatctttaaagttaaaagcttttgtacatcaaagaacactatcaagaaagtaaaaagatgatctacagtataggagaaaaaaattgcaaatcatatatctgataaagggcctagtatcccagaatataaaaagaactcttacaactcaacaacagaaagacaaccaaattttaaaatgggtaaaggacttcaatggaacttctccaaagaagatatacaaggatccaacaaactcatgaaaagatagacaacatcattagttattagggaaatgcaaatcaaaaccacaatgagatagcatttcaaacctgctaggatggctaaattaaaaaaaaaacaaaaacaaaatgtcaagcgggaaaataacaagtgttagcaagaatataaagaaattggaaccttccttgatgatgagaatgtgaaatagggcagccactgtagaaaatattttggcagttcctcagtaaggaaaacatagaattaacatagacccagcaattctactcctgggtgtggacccaaaagaattaaaagcaggcactctaacaaaaactaatatacaaatgcatatagaagtactattcataatagcaaacaggtgaaaacaattcaaatgttcatcaagtgatgaacagataaacaaaatgtggtctatccatatatggactattatttattcataaaaaatcaaagtactgatccatgctaaaacatggatgctccttgaaagcattatgctaagtgaaagcagccaggcacaaaaggccacattccacttatatgaaatacccagaatagcaaatccatagagacagaaaacagattagtggttgccagaagctggcagaaggagtgaatgtggagtggcttcttaataagtattgaatctccttttggggttatagaaatgttctggaactagatagtggtgatggctatataacattgtgaatgtactaaatggcactgaacttcacactttaaaattgttaaaatggtaaattttatgtttgcgaattttgcaatagataagtcagaagacatgtacattaccataatgagtaacaaactgacagctgatttctaaataatagcaaatatcagaaaataatgaatgatgtcttcacaatgctaaaataaacaatgtgaacccctctctcaaaaagaaaacctaatgaaaatatcttttatgcgttaaagcaaaagaggaaattaggacacagacaggcacagagggacgaccacatgaagatatagaaagaggacagacacctacaagccaacgagagaggccttacaagaaaccaacccttagccaggtgtggtagtgtgcacttgtagttcttgttacaagggtgcagtgagctagggttgtgccactgcactccagcctgggaaacagaacaagaccctgcctctaaaaaaaaaaataaagagaaggagaagaagaagaaaaggaaaagaaaaaaaaaaagaaccaagcctgctggccaggcgtggtaactcatgcctgtaatcccagcactttggaaggctgaggcaggaagatcatctgaggtcaggagttcaagaccagcctgcccaacatggtgaaacccccctctactaaaaatacaaaaattagctggacatgctggcatgcgcttgtaatcccagctactcgggaggctgaggcacaagaattgcttgagcccaggaggcagaagttgcagtgagcccagatcgcgccatcacattccagcctggactacagagggagactccatctcaaaaaacaaacagacaaaaaaaaaatacacacacacacacacacacacacacacacacacacaaaacaagcctgcctaccccttgatcttggacttgtagcctccagaactgtgagaaaataaatttctattgtttaagccaggtgtgcgtgtgaaaatttagaacatatgacaacagcaaaaaagtcagcatgtggataaatagaataaaggattctaaaatccatgtattatctaggaggtaaagatgttaatattaaaccttcataatttgattaatgttgtagtttataggatagccagtaagtaatagaaatacacacaatgtaagactcccaaaatggtagaagaaaaaatatgaaaggataaaatatactcaacaaacctaaatgaaagcaagcaaagagagataaagaaacataaaacaggtaggaaaaatagcaagataagatggtatatttaaattgaaatataacagtaatcatatgtaatatgaatggaccaaatatttcagttaaaagacaaagattgtcagattgataaaaaagcaaaagtagctgggtgtgatggctcacacctgtagtcccagctacttaggatgctgatgtgggaggatcacttgagcccaggaggttcagcctggacaagatagtgagacttgtctctttaaaaaaaaaaaaaaaaagcaaaagtaaattgtgtgcattttatgagtcatatctaaaacattagatacagaaaagtagcaagacaaaaatgggaaaagaaattatgcaaatatctaaaagatatcgattacagctctattgatagcagaaaaatagactttaaagcaagaaagtattgctgaagattaagaatgtgatttcatggctggacgcggtggctcacacctgtaatcccagcactttgggaggccgaggcaggtggatcatgaggtcaggaaattgagaccatcctggctaacatggtgaaaccccgtctctactaaaaaaaaatacaaaaattagccgggtgtggtggcggacacctgtagtcccagttactcaggagggtgaggcaggagaatggcgtgaactcgggaggctagattttaacacatctctcgtcaattgatggaacaatgtatagaaatagaacaattaacatgattcacaagtttgatcttatagacatatttagaaaatagcaccttgaaattgcaaaattacaagggtggttccaacatggccgaataggaacagctccagtctacagctcccagcatgaatgacacagaagacaggtgatttctgcatttccaactaaggtaccaggttaatctcactgtggcttgtcggacagtgggtgcaggacagtgggtgcagcccaccgagcatgagccgaagcagggtaaggtatcacctcacccgggaagcacaaggggtcagggaattccctttcctagccaagggaagctgtgacagatggcacctggaaaattgggtcactcccatcctaatactgcgcttttccaatggtcttagcaaacggcacaccaggagattatatcctgcacctggctcagagggtcccacacccacggagcctcgctcattgctagcacagcagtctgagatcaaactgcaaggtggctgcaaggcagggagaggggcacccgccattgctgaggcttgagtaggtaaacaaagcggccaggaagctcgaacttggtggagcccaccgcagctcaaggaggcctgcctgcctctgtacgctccacctttgggggcagggcaaagacaaacaaaaagacagcagtaacctctgcagacttaaatgtccctgtctgacagctttgaagagagtagtggttctcccagcacagagtttgtgatctgagaacggacagactgcctcctcaagtgggtccctgacccccgagtagcctaactgggaggcacgccccagtaggggcagactgacacctcacacagctgggtacccctctgagaccaagcttccagaggaacgatcaggcagcaacatttgctgttcagcaatattcgctcttctgcagcctctgctgctgatacccaggcaaacagggtctggagcggacctccagcaaactccaacagacctgcagctgagggtcctgtctgttagaaggaaaactaacaaacagaaaggacatccacaccaaaaccccatctgtacatcaccatcatcaaagaccaaaggtagataaaaccacaaagatggggaaaaaacagagcagaaaagctgaaaattctaaaaatcagagtacctctcctactccaaaggaacgcagctcctcgccagcaacggaacaaagctggacagaaaatgactttgacgagttgagagaagaaggcttcagatgatcaaacttctctgagctaaaggaggaagttcgaacccatcacaaagaagctaaaaaccttgaaaaaaaaggttagatgaatggctaactagaataaccagtatagagaagtccttaaatgacctgatggagctgaaaaccatggcacgagaactatgtgacgaatgcataagctttagtagccgatgcgatcaactggaagaaagggtatcagtgattgaagatcaaatgaatgaaatgaagcgagaagagaagtttagagaaaaaagaataaaaagaaatgaacaaagcctccaagaaatatgggactatgtgaaaagaccaaatctatgtctgattagtgtacctgaaagtgacagggagaatggaaccaagttggaaaacactctgcaggatattatccaggagaacttccccaacctagcaaggcaggccaacattcaaattcaggaaatacagagaacgccacaaagatactccttgagaagagcaactccaagacacataactgtcagattcaccaaagttgaaatgaaggaaaaaatgttaagggcagccagacagaaagttcgggttacccgcaaagggaagcccatcagactaacagctgatctcttggcagaaactctacaagccagaagagagtgggggccaatattcaacattcttaaagaaaagaattttcaacccagaatttcatatccagccaaactaagcttcataagtgaaggagaaataaaatcctttacagacaagcaaatgctgagagattttgtcaccaccaggcttgccctacaagagctcctgaaggaagcactaaacatagaaaggaacaaccggtaccagccactgcaaaaacatcccaaattgtaaagaccatcgatgctaggaagaaactgcatcaactaatgagcaaaataaccagctaacatcataatgacaggatcaaattcacacataacaatattaaccttaaacataaatgggctaactgctccaattaaaagacacagactggcacattggataaagagtcaagacccatcagtgtgctgtattcaggagacccatctcacatgcagagactcacataggctcgaaataaagggatggaggaagatctaccaagcaaatggaaaacaaaaaaagaaaagcaggggttgcaatcctagtctctgataaaacagactttaaaccaacaaagatcaaaagagacaaggccattacataatggtaaagggatcaattcaacaagaagagctaactatccaaaatatatatgcacccaatacaggagcacccagattcataaagcaagtccttagagacctacaaagagacttagactcccacacaataataatgggagactttaacaccccactgtcaacattagacagttcaacgagacagaaagttaacaaggatatccaggaattgaactcagctctgcagcaagcggacctaatagacatctacagaactctccatcccaaatcaacagaatatacattcttctcagcaccacatccaaaactgaccacatagttggaagtaaagcactcctcagcaaatgtaaaagaacagaaattataacaaactgtctctcaggccacagtgcaatcaaactagaactcaggattaagaaactcattcaaaaccgctcaactacatggaaactgaacaacctgctcctgaatgactactgggtacatagcgaaatgaaggcagaaataaagatgttctttgaaaccaatgagaacaaagacacaatataccagaatctctgggacacatttaaagcagtgtgtagaggaaaatttatagcactaagtgcccacaggagaaagcaggaaagatcaaaaattgacaccctaacatcacaatttaaagaactagagaagcaagagcaaacacattcaaaagctggcagaaggcaagaaataactaagatcagagcagaactgaaggagatagagacacaaaaaaccctttaaaaaatcaatgaatccaggaactggttttttgaaaagatcaacaaaattgatagaacactagcaagactaataaagaagaaaagagagaagaatcaaatagacgcaataaaaaatgataaaggggatatcaccaccaatcccacagaaatacaaactaccatcagagaatactataaacacctctatgtaaataaactagaaaatctagaagaaatggataaattcctggacacatacaccctcccaagactaaaccaggaagaagttgaatccctgaatagaccaataacaggctctgaaattgaggcaataattaatagcttaccaaccaaaaaaagtccaggaccagacggattcacactcaaattctaccagaactacaaggaggagctggtaccattccttctgaaactattccaatcaatagaaaaagatggaatcctccctaactcattttatgaggccagcatcatcctgataccaaagcctggcagagaaacaacaaaaaaagagaattttagaccaatatccctgatgaacattgatgcaaaaatcctcaataaaatactggcaaaccaaatccagcagcacatcaaaaagcttatccaccatgatcaagtgggcttcatctctgggatgcaaggctggttcaacatacgaaaatcaataaacgtaatccagcatataaacagaaccaaagacaaaaaccacatgattatctcaatagatgcagaaaaggcctttgacaaaattcaacaacacttcatgctaaaaactctcaataaattaggtattgatgggacgtatctcaaaataataagagctatttatgacaaacccacagccaatatcatactgaatgggcaaaaactggaagcattccctttgaaaactggcacaagacagggatgccctctctcaccactcctattcaacatagtgttggaagttctggccagggcaatcaggcaggagaaagaaataaagggtattcaattaggaaaagaggaagtcaaattgtccctgttcgcagacgacatgattgtatatctagaaaacaccattgtctcagcccaaaatctccttatgctgataagcaacttcagcaaagtctcaggatacaaaatcaatgtgcaaaaatcacaagcattcttatacaccaacaacagacaaacagagagccaaatcatgagtgaactcccattcacaattgcttcaaagagaataaaatacctaggaatccaacttacaagggatatgaaggacctcttcaaggagaactacaaaccactgctcaatgaaataaaaggggatacaaacaaatggaagaacattccatgctcatgggtaggaagaatcaatattgtgaaaatggccatactgcccaaggtattttatagattcaatgccatccccatcatgctaccaatgactttctttacagaattctaaaaaactattttaaagttcatttggaaccaaaaaagagcccgcattgccaagtcaatcctaagccaaaagaacaaagctggaggcatcacgctacctgacttcaaactatactacacggctacagtaaccaaaacagcatggtactggtaccaaaacagagatatagaccaatggaacagaacagagccctcagaagtaataccacacatctacaaccatctgatctttgacaaacctgacaaaaacaagaaatggggaaaggattccctattgaataaatggtgctgggaaaactggctagccatatgtagaaagctgaaactggatcccttccttacaccttatacaaaaattaattcaagatggattaaagacttaaatgttagacctaaaaccataaaaaccctagaagaaaacctaggcaataccattcaggacataggcatgggcaagaacttcatgtctaaaacaccaaaagcaatggcaacaaaagccaaaattgacaaatgggatctaatgaaactaaagagcttccgcacagcaaaagaaactaccatcccagtgaacaggcgagctacaaattgggagaaaatgtttgcaatctattcatctgacaaagggctaatatccagaatctacgaagaactcaaacaaacttacaagaaaaaaagaccccatcaaaaagtgggtgaaggatataaacagacacttctcaaaagaagacatttatgcagccaacagatacatgaaaaaatgctcatcatcactggccatcagagaaatgcaaatcaaaaccacagtgagataccatctcacaccagttagaatggcgatcattaaaaagtcaggaaacaacaggtgctggagaggatgtggagaaataggaacgcttttacactgttggtgggactgtaaactagttcaacaattgtggaagacagtgtggcgattcctcaaggatctagaactagaaataccatttgacccagccatcccattactgggtatgtacccaaaggattataaatcatgctgctataaagacacatgcacacgtatgtttattgcggcactattcacaatagcaaagacttggaaccaacccaaatgtccatcaatgatagactggattaagaaaatgtggcacatatacaccatggaatactatgcagccataaaaaggatctgttcatgtcctttgtagggacatggatgaagctggaaaccatcattctcaaaaactatcacaaggacaaaaaaccaaacaccgcatgttctcactcgtaggtgggaattgaacaataagaacacttggacacaggtaggggaacatcacacaccggggcctgtcatggggtgggtggacaggggagggatagcattaggagatatacctaatgtaaatgacgagttaatgggtgcagcacaccaacatggcacatgtatacatatgtaacaaacctgcacgttgtgcacatgtaccctagaacttacagtataataaaaaaaaagaaattgcaaaattacacattctttgtaagcacacaaaggaaacatgttagaattttccattttaagctacaaataagctacaaataaagtagtctcaaatttcagataatataaaacatgttttctggtcacaatacaattaaagttgatataaataagaaagataactataaaatcttcctatgttagaatcaagaactatacttttaaacccatgtgtcaaataagaaatcataaattagaaaatattttaaactgaatgataacaaggcatgacatattaaaatgtgggaatcagctaaagcaatatttagaaagaaatgtatagcgttaaaaacatatattggaagagaagaaagcctgacaattaatgagctaaggtatgtctcaagaagctagtgaaacagcaaaataaaccaaaaggaagtagaagcaaggaaataataaagatatgaagtaaatgaagtaaaaaagaaacatacaatagagagaataaagaaaaccaaaagttggttccttgaaaattgacaaacttctggcaagagcaatcaagatgaaaagaaggcacaaataatatcagaaactttaaaaaactggacatcaataaagatcccacaaaaatttctgccaatataaaaatataaaaaatgaggatacttattaatattaaatgttctttcttgttgtatttaccagggattaatccattttacctaattttccaaacttagtgttaaaaggttattaatttaaaaaatccagatccagatggctacactaactatattctaccaatttttcaaaggagaaataatattaaccttgcaaaaattctttcagaaaatggaaaaagatggaatgttattcaattatcttatgataatagcataaccttgacaaccaaaccgaacaagaacaatattagaaaggaagataataggcccgttttattcataaacataaatcccaaacaaaatattagcaatatggatccaaattggatttatgctaggaatgcaagtttggcttatacattagaaaactgatataatttatcacagtgacagactgaaggattatacatattggctgtcctaagcagtgcaataagatgagaaaaagaaggaaaatatgtaaggattgaatatgatgaaacaaactcattgtatgtggaagatatgatggcatagatagaaaatccaaaggaatttatatataaattattagaatttttaaaatttttcaagcttgctgaaaacaaaataaataccaaaattaattgtatttctgtatacctgaaacagttggaaaaatagttttaaatagcatttaaaaattccaagcaggagttgcacattcctgtcagataatggcagctgcctaaatctctccacagtcttcaaaaaccatacatacacatacacacacaattttaaattatgactaaaaccacccataacccatctatagaataaccagaagacaaaaagtactataagtttatatttacaagtagaaaataaatatataaatctagccaaccttgctccagagagaaaccctgtctcaaaaaaaaaaaaaaaaaaaaaaagaagaaagcaaatgttggaaattaactgtcctataaaaacaaaagtgaattactaaatcacaagacccacaaacctctttggtcacatctattaaataaattacacttccatttatcaacagtagagggtactcctggctaagaaacctagtaagccacccagccctcatgtctgcctgcataaatcacctcttattgctgaaacaagaaaatgtaaggaatttctaaatgaacagaaaatagcatatgaagcagatggtattaatgttcttgagtttttattccctctttccttgaaaacctcatcaactttaggcatggccgtacggctcatcttgatcaatagaatgtgattggacatgacatatataccacttccaaatagaagctttaaatgtgattttgtgtttgacacactcttttgtgcctctgctccaggctccagactttaagcctctagaacgataagtgaataaatttcttttgttttaaaggcaccaagtgtgtggtgaatttgttacagtagccctagaaatctaatactaacaaaaagaatgttagagttgaattagaagtgtcagtgagaacttaggaatttaaaaaatcatattcttagcactgttcactgagggaatctagaagtaattacactgcagtaataacgagcccatcccatgcccaaatcttggtctctaactaccattttccagtcaaaagaatctgagctccctagagaaatgactttttcaaggctggatcaaggaaactgccaggcaatcttagatgatcttggtgatcttgatgtgccagaagattaatgggatcatgtgaaaagaacacagaaactggtctgaagggcttcctgttggccagatttgagacaatttgagcatcaaaaggaataatgagggtaatggatcataactggaaaatcagtttgcaaccatcaatgtacttactattgaatacttgtaaagaactttaagggttgctaataccattggataaaagcttgttgtgaaacagaatatttgcatggtctcaaagtctcactccacagattgttaggaaagggaaagggttacctttataaatatagagattaggtggacatcttaaccaagtgatcaaacttagcatcatcaataatgggacaatctggcatcgcatgccccctgatttaatgcagtaaggattaagtctaacaaaagatgtacaaagcctccaaatacagcgtaaacatttgtaaaataatctcagaacagggaccttaatgtttctcaaaaatttttccaaatacagaactttatttctatagatgtttatggtatatttgccatgctatatacattatgctatatattctatgtgctgaagatacaacaatgaccaaggtctttgcccttgtggaactgacatttggtggcggagacagaggaaacagtcaataagcatgtaaagagataaaggaaaagatactgaatgctacaaaggaaacaaataagttgagatttagaacaaaaaagagtcctattttacaagaggaataatgaggaagacctttctaaagaggtagctcagcactttgggaggccgaggcgggtggatcacgaggtcaggagatcaagaccatcctggctaacacagtgaaaccccatctctactaaaaatacaaaaaatgagccgggcatggtggcgggcacctgtagtcccagctacttgggaggctgaggcaggagaatggcgtgaacccgggaggcggagcttgcagtgagccgagatggtgccactgcactccagcctgggcgacagagcgagactccgtctcaaaaaaaaaaaaaaaaattgaggcagaatttcgctatgttgcctaggcttgtctcaaactcctgggctcaagcaatcctcctgcctcagcctgctgagtagctgggactccaggggcatgccactatgcttagtttaagaggtggtatttaaactgagacccgaagggtaaaaaacatggataaaagaagaaacagaaggggtaagagccttccaagcagagggaatcacatatacaaaggctctcatgttaaataaaacaagagttgacattgttgagaaactgaaagatcagctcatctgcgatgcggtaaaataggaggaatgcagtgggagaacagatcagagacttgggcaggggctatattaggcagaacttggagaccagagtaagggggccaaggtgggaacagaccgattaaattggcatctcttgggggggtgggggggtggggaacttacccatgcatcattttttaaaagctccaaaggcgattccaataagcagccagggttgggaacctagggggaaaatgtagctagatgaatgaagatggcccaaacgtcttttgttctgatagctaaactctctgtaggatcacagtgttacttcacagtgcatttgccaggaaaagtctcttcccatttggaatccgaagtaaaactgacaccacacttgaagatgccaggattgttagaggaaaatgtcacccaatagctccaggaagcaggagccctactgttgctgtttaaccacttctttcccattttggtggcaagttgcctccttttacacaaactgcctcaggagatcctaaagatatcatggtgtctgtctgtccttgcaagagcatgcattatggtaggacattgccttcattctgttcctttttctccaagactcttgcttattctcaccatttggctggactttctactgtaggattacctcggaatccacacaaaacccacagggtttcagagttgccttgaattacacgttttgaacattcagatcttcattttcccaaacatccacccagttataggtgacctttgctccaaagtcctggagtagcaaggtgccttgagtcttagactcttcccacttctttctctcttctgcatcccctcctgccaaggttgcccagccacactaaattgcatgccttgctgtgttgcattcgttatcattctaaagttgtcaccaacatgtgcgaaaccagtttatctaataacgatagctaccattttctgagctcttgccatgtactcctcttgccacagcaaatgcattgacaagggagtctgctggccaaagcctgactctcatctccagatggtccaacacagatgctgtgtgtgacccaggacaaagcacttaatgtcactgaggtttgggaagtgggtgagaacactgtagatataaggcctagctagagtgaaggcctccaaagcagggtgctcttaattctagatgtcccagatgcgtaggacagagtcatctagtcatcttccagggtttaatcctggactactggaaacaactagaagtgagaaaagcgtctgtgctttgcagtgaccattgtcctgtcagacaaccaataaatgctatctttcctctttcaggtttttcagggaaatcaagactccttcacacctgtggtgaactctctagacccaccgttactgactcgctaccttcgaattcacccccagagttgggtgcaccagattgccctgaggatggaggttctgggctgcgaggcacaggacctctactgagggtggccactgcagcacctgccactgccgtcacctctccctcctcagctccagggcagtgtccctccctggcttgccttctacctttgtgctaaatcctagcagacactgccttgaagcctcctgaattaactatcatcagtcctgcatttctttggtggggggccaggagggtgcatccaatttaacttaactcttacctattttctgcagctgctcccagattactccttccttccaatataactaggcaaaaagaagtgaggagaaacctgcatgaaagcattcttccctgaaaagttaggcctctcagagtcaccacttcctctgttgtagaaaaactatgtgatgaaactttgaaaaagatatttatgatgttaacatttcaggttaagcctcatacgtttaaaataaaactctcagttgtttattatcctgatcaagcatggaacaaagcatgtttcaggatcagatcaatacaatcttggagtcaaaaggcaaatcatttggacaatctgcaaaatggagagaatacaataactactacagtaaagtctgtttctgcttccttacacatagatataattatgttatttagtcattatgaggggcacattcttatctccaaaactagcattcttaaactgagaattatagatggggttcaagaatccctaagtcccctgaaattatataaggcattctgtataaatgcaaatgtgcatttttctgacgagtgtccatagatataaagccatttggtcttaattctgaccaataaaaaaataagtcaggaggatgcaattgttgaaagctttgaaataaaataacaatgtcttcttgaaatttgtgatggccaagaaagaaaatgatgatgacattaggcttctaaaggacatacatttaatatttctgtggaaatatgaggaaaatccatggttatctgagataggagatacaaactttgtaattctaataatgcactcagtttactctctccctctactaatttcctgctgaaaataacacaacaaaaatgtaacaggggaaattatataccgtgactgaaaactagagtcctacttacatagttgaaatatcaaggaggtcagaagaaaattggactggtgaaaacagaaaaaacactccagtctgccatatcaccacacaataggatcccccttcttgccctccacccccataagattgtgaagggtttactgctccttccatctgcctgaccccttcactatgactacacagaatctcctgatagtaaagggggctggagacaaggataagttatagagcagttggaggaagcatccaaagattgcaacccagggcaaatggaaaacaggagatcctaatatgaaagaaaaatggatcccaatctgagaaaaggcaaaagaatggctacttttttctatgctggagtattttctaataatcctgcttgacccttatctgacctctttggaaactataacatagctgtcacagtatagtcacaatccacaaatgatgcaggtgcaaatggtttatagccctgtgaagttcttaaagtttagaggctaacttacagaaatgaataagttgttttgttttatagcccggtagaggagttaaccccaaaggtgatatggttttatttcctgttatgtttaacttgataatcttattttggcattcttttcccattgactatatacatctctatttctcaaatgttcatggaactagctcttttattttcctgctggtttcttcagtaatgagttaaataaaacattgacacatacaaacaaatgcctttgagaattgtgtttttacactggaaataaaaatgtgaacactgatttttaaaacaaataggggcactgaatagcaagatggacactctagaaaaccaaattagtgagttagaaaaccagattaaattgaactcagagtaaaaatgatataattcatgagagtctgaataaaataaatcagaaatggagcctcaatccaggagaacagcttatatggagagagagagactgagagagaaatgggagtttctgttcaatgggcataaagtttcagctatgctgctgggcacagtggctcatgcctgtaatcctggcactttgggaggccaaggcgggcggatcacctgaggtcgggagttcaagaccagcctagccaacatggcgaaatcccgtcgctaataaaaatataaaaattagttgggcatggtggcacatgcctgtagtcccagctacttgggaggttgaggcacaagaatcgcttgaacccgggaggcgggtggaggttgcagtgagccaagatcgtgccgttgcattccatcagcctgggcaacagagtgagactccatctcaaaaaaaaaaaagtttcagttatgcaagatgaattaagttctacagatctaatgtacaacattgtgcatatagctaacgataccatactgggcacttaaaaatttgttaagagagcagataccacgttgtgttcttactacagttttacaacaatgcaaaaatgcattgtaaacactatgtgcaaatagaatagcaaagaatgtatacagtgcccatgagcataacattctagtggacccacaatgcatcagagttcagtgagactcaaagggagaagaatgttggcaaagtcagtggggaggagaaaatgagtgtgatgaaataggcggtctcattaaacttcccttacaaaacacaagatcaaagataaaattattaagaatttcgagacagtgacatcagagcaaacgaaacatagg

SEQ ID NO: 7 - DNA, 7053 bp, Artificial Sequence
  synthetic construct
atgcaaatagagctctccacctgcttctttctgtgccttttgcgattctgctttagtgccaccagaagatactacctgggtgcagtggaactgtcatgggactatatgcaaagtgatctcggtgagctgcctgtggacgcaagatttcctcctagagtgccaaaatcttttccattcaacacctcagtcgtgtacaaaaagactctgtttgtagaattcacggatcaccttttcaacatcgctaagccaaggccaccctggatgggtctgctaggtcctaccatccaggctgaggtttatgatacagtggtcattacacttaagaacatggcttcccatcctgtcagtcttcatgctgttggtgtatcctactggaaagcttctgagggagctgaatatgatgatcagaccagtcaaagggagaaagaagatgataaagtcttccctggtggaagccatacatatgtctggcaggtcctgaaagagaatggtccaatggcctctgacccactgtgccttacctactcatatctttctcatgtggacctggtaaaagacttgaattcaggcctcattggagccctactagtatgtagagaagggagtctggccaaggaaaagacacagaccttgcacaaatttatactactttttgctgtatttgatgaagggaaaagttggcactcagaaacaaagaactccttgatgcaggatagggatgctgcatctgctcgggcctggcctaaaatgcacacagtcaatggttatgtaaacaggtctctgccaggtctgattggatgccacaggaaatcagtctattggcatgtgattggaatgggcaccactcctgaagtgcactcaatattcctcgaaggtcacacatttcttgtgaggaaccatcgccaggcgtccttggaaatctcgccaataactttccttactgctcaaacactcttgatggaccttggacagtttctactgttttgtcatatctcttcccaccaacatgatggcatggaagcttatgtcaaagtagacagctgtccagaggaaccccaactacgaatgaaaaataatgaagaagcggaagactatgatgatgatcttactgattctgaaatggatgtggtcaggtttgatgatgacaactctccttcctttatccaaattcgctcagttgccaagaagcatcctaaaacttgggtacattacattgctgctgaagaggaggactgggactatgctcccttagtcctcgcccccgatgacagaagttataaaagtcaatatttgaacaatggccctcagcggattggtaggaagtacaaaaaagtccgatttatggcatacacagatgaaacctttaagactcgtgaagctattcagcatgaatcaggaatcttgggacctttactttatggggaagttggagacacactgttgattatatttaagaatcaagcaagcagaccatataacatctaccctcacggaatcactgatgtccgtcctttgtattcaaggagattaccaaaaggtgtaaaacatttgaaggattttccaattctgccaggagaaatattcaaatataaatggacagtgactgtagaagatgggccaactaaatcagatcctcggtgcctgacccgctattactctagtttcgttaatatggagagagatctagcttcaggactcattggccctctcctcatctgctacaaagaatctgtagatcaaagaggaaaccagataatgtcagacaagaggaatgtcatcctgttttctgtatttgatgagaaccgaagctggtacctcacagagaatatacaacgctttctccccaatccagctggagtgcagcttgaggatccagagttccaagcctccaacatcatgcacagcatcaatggctatgtttttgatagtttgcagttgtcagtttgtttgcatgaggtggcatactggtacattctaagcattggagcacagactgacttcctttctgtcttcttctctggatataccttcaaacacaaaatggtctatgaagacacactcaccctattcccattctcaggagaaactgtcttcatgtcgatggaaaacccaggtctatggattctggggtgccacaactcagactttcggaacagaggcatgaccgccttactgaaggtttctagttgtgacaagaacactggtgattattacgaggacagttatgaagatatttcagcatacttgctgagtaaaaacaatgccattgaaccaagaagcttctcccagaattcaagacaccctagcactaggcaaaagcaatttaatgccaccacaattccagaaaatgacatagagaagactgacccttggtttgcacacagaacacctatgcctaaaatacaaaatgtctcctctagtgatttgttgatgctcttgcgacagagtcctactccacatgggctatccttatctgatctccaagaagccaaatatgagactttttctgatgatccatcacctggagcaatagacagtaataacagcctgtctgaaatgacacacttcaggccacagctccatcacagtggggacatggtatttacccctgagtcaggcctccaattaagattaaatgagaaactggggacaactgcagcaacagagttgaagaaacttgatttcaaagtttctagtacatcaaataatctgatttcaacaattccatcagacaatttggcagcaggtactgataatacaagttccttaggacccccaagtatgccagttcattatgatagtcaattagataccactctatttggcaaaaagtcatctccccttactgagtctggtggacctctgagcttgagtgaagaaaataatgattcaaagttgttagaatcaggtttaatgaatagccaagaaagttcatggggaaaaaatgtatcgtcaacagagagtggtaggttatttaaagggaaaagagctcatggacctgctttgttgactaaagataatgccttattcaaagttagcatctctttgttaaagacaaacaaaacttccaataattcagcaactaatagaaagactcacattgatggcccatcattattaattgagaatagtccatcagtctggcaaaatatattagaaagtgacactgagtttaaaaaagtgacacctttgattcatgacagaatgcttatggacaaaaatgctacagctttgaggctaaatcatatgtcaaataaaactacttcatcaaaaaacatggaaatggtccaacagaaaaaagagggccccattccaccagatgcacaaaatccagatatgtcgttctttaagatgctattcttgccagaatcagcaaggtggatacaaaggactcatggaaagaactctctgaactctgggcaaggccccagtccaaagcaattagtatccttaggaccagaaaaatctgtggaaggtcagaatttcttgtctgagaaaaacaaagtggtagtaggaaagggtgaatttacaaaggacgtaggactcaaagagatggtttttccaagcagcagaaacctatttcttactaacttggataatttacatgaaaataatacacacaatcaagaaaaaaaaattcaggaagaaatagaaaagaaggaaacattaatccaagagaatgtagttttgcctcagatacatacagtgactggcactaagaatttcatgaagaaccttttcttactgagcactaggcaaaatgtagaaggttcatatgacggggcatatgctccagtacttcaagattttaggtcattaaatgattcaacaaatagaacaaagaaacacacagctcatttctcaaaaaaaggggaggaagaaaacttggaaggcttgggaaatcaaaccaagcaaattgtagagaaatatgcatgcaccacaaggatatctcctaatacaagccagcagaattttgtcacgcaacgtagtaagagagctttgaaacaattcagactcccactagaagaaacagaacttgaaaaaaggataattgtggatgacacctcaacccagtggtccaaaaacatgaaacatttgaccccgagcaccctcacacagatagactacaatgagaaggagaaaggggccattactcagtctcccttatcagattgccttacgaggagtcatagcatccctcaagcaaatagatctccattacccattgcaaaggtatcatcatttccatctattagacctatatatctgaccagggtcctattccaagacaactcttctcatcttccagcagcatcttatagaaagaaagattctggggtccaagaaagcagtcatttcttacaaggagccaaaaaaaataacctttctttagccattctaaccttggagatgactggtgatcaaagagaggttggctccctggggacaagtgccacaaattcagtcacatacaagaaagttgagaacactgttctcccgaaaccagacttgcccaaaacatctggcaaagttgaattgcttccaaaagttcacatttatcagaaggacctattccctacggaaactagcaatgggtctcctggccatctggatctcgtggaagggagccttcttcagggaacagagggagcgattaagtggaatgaagcaaacagacctggaaaagttccctttctgagagtagcaacagaaagctctgcaaagactccctccaagctattggatcctcttgcttgggataaccactatggtactcagataccaaaagaagagtggaaatcccaagagaagtcaccagaaaaaacagcttttaagaaaaaggataccattttgtccctgaacgcttgtgaaagcaatcatgcaatagcagcaataaatgagggacaaaataagcccgaaatagaagtcacctgggcaaagcaaggtaggactgaaaggctgtgctctcaaaacccaccagtcttgaaacgccatcaacgggaaataactcgtactactcttcagtcagatcaagaggaaattgactatgatgataccatatcagttgaaatgaagaaggaagattttgacatttatgatgaggatgaaaatcagagcccccgcagctttcaaaagaaaacacgacactattttattgctgcagtggagaggctctgggattatgggatgagtagctccccacatgttctaagaaacagggctcagagtggcagtgtccctcagttcaagaaagttgttttccaggaatttactgatggctcctttactcagcccttataccgtggagaactaaatgaacatttgggactcctggggccatatataagagcagaagttgaagataatatcatggtaactttcagaaatcaggcctctcgtccctattccttctattctagccttatttcttatgaggaagatcagaggcaaggagcagaacctagaaaaaactttgtcaagcctaatgaaaccaaaacttacttttggaaagtgcaacatcatatggcacccactaaagatgagtttgactgcaaagcctgggcttatttctctgatgttgacctggaaaaagatgtgcactcaggcctgattggaccccttctggtctgccacactaacacactgaaccctgctcatgggagacaagtgacagtacaggaatttgctctgtttttcaccatctttgatgagaccaaaagctggtacttcactgaaaatatggaaagaaactgcagggctccctgcaatatccagatggaagatcccacttttaaagagaattatcgcttccatgcaatcaatggctacataatggatacactacctggcttagtaatggctcaggatcaaaggattcgatggtatctgctcagcatgggcagcaatgaaaacatccattctattcatttcagtggacatgtgttcactgtacgaaaaaaagaggagtataaaatggcactgtacaatctctatccaggtgtttttgagacagtggaaatgttaccatccaaagctggaatttggcgggtggaatgccttattggcgagcatctacatgctgggatgagcacactttttctggtgtacagcaataagtgtcagactcccctgggaatggcttctggacacattagagattttcagattacagcttcaggacaatatggacagtgggccccaaagctggccagacttcattattccggatcaatcaatgcctggagcaccaaggagcccttttcttggatcaaggtggatctgttggcaccaatgattattcacggcatcaagacccagggtgcccgtcagaagttctccagcctctacatctctcagtttatcatcatgtatagtcttgatgggaagaagtggcagacttatcgaggaaattccactggaaccttaatggtcttctttggcaatgtggattcatctgggataaaacacaatatttttaaccctccaattattgctcgatacatccgtttgcacccaactcattatagcattcgcagcactcttcgcatggagttgatgggctgtgatttaaatagttgcagcatgccattgggaatggagagtaaagcaatatcagatgcacagattactgcttcatcctactttaccaatatgtttgccacctggtctccttcaaaagctcgacttcacctccaagggaggagtaatgcctggagacctcaggtgaataatccaaaagagtggctgcaagtggacttccagaagacaatgaaagtcacaggagtaactactcagggagtaaaatctctgcttaccagcatgtatgtgaaggagttcctcatctccagcagtcaagatggccatcagtggactctcttttttcagaatggcaaagtaaaggtttttcagggaaatcaagactccttcacacctgtggtgaactctctagacccaccgttactgactcgctaccttcgaattcacccccagagttgggtgcaccagattgccctgaggatggaggttctgggctgcgaggcacaggacctctac

SEQ ID NO: 8 - DNA, 7053 bp, Artificial Sequence
  synthetic construct
atgcaaatagagctctccacctgcttctttctgtgccttttgcgattctgctttagtgccaccagaagatactacctgggtgcagtggaactgtcatgggactatatgcaaagtgatctcggtgagctgcctgtggacgcaagatttcctcctagagtgccaaaatcttttccattcaacacctcagtcgtgtacaaaaagactctgtttgtagaattcacggatcaccttttcaacatcgctaagccaaggccaccctggatgggtctgctaggtcctaccatccaggctgaggtttatgatacagtggtcattacacttaagaacatggcttcccatcctgtcagtcttcatgctgttggtgtatcctactggaaagcttctgagggagctgaatatgatgatcagaccagtcaaagggagaaagaagatgataaagtcttccctggtggaagccatacatatgtctggcaggtcctgaaagagaatggtccaatggcctctgacccactgtgccttacctactcatatctttctcatgtggacctggtaaaagacttgaattcaggcctcattggagccctactagtatgtagagaagggagtctggccaaggaaaagacacagaccttgcacaaatttatactactttttgctgtatttgatgaagggaaaagttggcactcagaaacaaagaactccttgatgcaggatagggatgctgcatctgctcgggcctggcctaaaatgcacacagtcaatggttatgtaaacaggtctctgccaggtctgattggatgccacaggaaatcagtctattggcatgtgattggaatgggcaccactcctgaagtgcactcaatattcctcgaaggtcacacatttcttgtgaggaaccatcgccaggcgtccttggaaatctcgccaataactttccttactgctcaaacactcttgatggaccttggacagtttctactgttttgtcatatctcttcccaccaacatgatggcatggaagcttatgtcaaagtagacagctgtccagaggaaccccaactacgaatgaaaaataatgaagaagcggaagactatgatgatgatcttactgattctgaaatggatgtggtcaggtttgatgatgacaactctccttcctttatccaaattcgctcagttgccaagaagcatcctaaaacttgggtacattacattgctgctgaagaggaggactgggactatgctcccttagtcctcgcccccgatgacagaagttataaaagtcaatatttgaacaatggccctcagcggattggtaggaagtacaaaaaagtccgatttatggcatacacagatgaaacctttaagactcgtgaagctattcagcatgaatcaggaatcttgggacctttactttatggggaagttggagacacactgttgattatatttaagaatcaagcaagcagaccatataacatctaccctcacggaatcactgatgtccgtcctttgtattcaaggagattaccaaaaggtgtaaaacatttgaaggattttccaattctgccaggagaaatattcaaatataaatggacagtgactgtagaagatgggccaactaaatcagatcctcggtgcctgacccgctattactctagtttcgttaatatggagagagatctagcttcaggactcattggccctctcctcatctgctacaaagaatctgtagatcaaagaggaaaccagataatgtcagacaagaggaatgtcatcctgttttctgtatttgatgagaaccgaagctggtacctcacagagaatatacaacgctttctccccaatccagctggagtgcagcttgaggatccagagttccaagcctccaacatcatgcacagcatcaatggctatgtttttgatagtttgcagttgtcagtttgtttgcatgaggtggcatactggtacattctaagcattggagcacagactgacttcctttctgtcttcttctctggatataccttcaaacacaaaatggtctatgaagacacactcaccctattcccattctcaggagaaactgtcttcatgtcgatggaaaacccaggtctatggattctggggtgccacaactcagactttcggaacagaggcatgaccgccttactgaaggtttctagttgtgacaagaacactggtgattattacgaggacagttatgaagatatttcagcatacttgctgagtaaaaacaatgccattgaaccaagaagcttctcccagaattcaagacaccctagcactaggcaaaagcaatttaatgccaccacaattccagaaaatgacatagagaagactgacccttggtttgcacacagaacacctatgcctaaaatacaaaatgtctcctctagtgatttgttgatgctcttgcgacagagtcctactccacatgggctatccttatctgatctccaagaagccaaatatgagactttttctgatgatccatcacctggagcaatagacagtaataacagcctgtctgaaatgacacacttcaggccacagctccatcacagtggggacatggtatttacccctgagtcaggcctccaattaagattaaatgagaaactggggacaactgcagcaacagagttgaagaaacttgatttcaaagtttctagtacatcaaataatctgatttcaacaattccatcagacaatttggcagcaggtactgataatacaagttccttaggacccccaagtatgccagttcattatgatagtcaattagataccactctatttggcaaaaagtcatctccccttactgagtctggtggacctctgagcttgagtgaagaaaataatgattcaaagttgttagaatcaggtttaatgaatagccaagaaagttcatggggaaaaaatgtatcgtcaacagagagtggtaggttatttaaagggaaaagagctcatggacctgctttgttgactaaagataatgccttattcaaagttagcatctctttgttaaagacaaacaaaacttccaataattcagcaactaatagaaagactcacattgatggcccatcattattaattgagaatagtccatcagtctggcaaaatatattagaaagtgacactgagtttaaaaaagtgacacctttgattcatgacagaatgcttatggacaaaaatgctacagctttgaggctaaatcatatgtcaaataaaactacttcatcaaaaaacatggaaatggtccaacagaaaaaagagggccccattccaccagatgcacaaaatccagatatgtcgttctttaagatgctattcttgccagaatcagcaaggtggatacaaaggactcatggaaagaactctctgaactctgggcaaggccccagtccaaagcaattagtatccttaggaccagaaaaatctgtggaaggtcagaatttcttgtctgagaaaaacaaagtggtagtaggaaagggtgaatttacaaaggacgtaggactcaaagagatggtttttccaagcagcagaaacctatttcttactaacttggataatttacatgaaaataatacacacaatcaagaaaaaaaaattcaggaagaaatagaaaagaaggaaacattaatccaagagaatgtagttttgcctcagatacatacagtgactggcactaagaatttcatgaagaaccttttcttactgagcactaggcaaaatgtagaaggttcatatgagggggcatatgctccagtacttcaagattttaggtcattaaatgattcaacaaatagaacaaagaaacacacagctcatttctcaaaaaaaggggaggaagaaaacttggaaggcttgggaaatcaaaccaagcaaattgtagagaaatatgcatgcaccacaaggatatctcctaatacaagccagcagaattttgtcacgcaacgtagtaagagagctttgaaacaattcagactcccactagaagaaacagaacttgaaaaaaggataattgtggatgacacctcaacccagtggtccaaaaacatgaaacatttgaccccgagcaccctcacacagatagactacaatgagaaggagaaaggggccattactcagtctcccttatcagattgccttacgaggagtcatagcatccctcaagcaaatagatctccattacccattgcaaaggtatcatcatttccatctattagacctatatatctgaccagggtcctattccaagacaactcttctcatcttccagcagcatcttatagaaagaaagattctggggtccaagaaagcagtcatttcttacaaggagccaaaaaaaataacctttctttagccattctaaccttggagatgactggtgatcaaagagaggttggctccctggggacaagtgccacaaattcagtcacatacaagaaagttgagaacactgttctcccgaaaccagacttgcccaaaacatctggcaaagttgaattgcttccaaaagttcacatttatcagaaggacctattccctacggaaactagcaatgggtctcctggccatctggatctcgtggaagggagccttcttcagggaacagagggagcgattaagtggaatgaagcaaacagacctggaaaagttccctttctgagagtagcaacagaaagctctgcaaagactccctccaagctattggatcctcttgcttgggataaccactatggtactcagataccaaaagaagagtggaaatcccaagagaagtcaccagaaaaaacagcttttaagaaaaaggataccattttgtccctgaacgcttgtgaaagcaatcatgcaatagcagcaataaatgagggacaaaataagcccgaaatagaagtcacctgggcaaagcaaggtaggactgaaaggctgtgctctcaaaacccaccagtcttgaaacgccatcaacgggaaataactcgtactactcttcagtcagatcaagaggaaattgactatgatgataccatatcagttgaaatgaagaaggaagattttgacatttatgatgaggatgaaaatcagagcccccgcagctttcaaaagaaaacacgacactattttattgctgcagtggagaggctctgggattatgggatgagtagctccccacatgttctaagaaacagggctcagagtggcagtgtccctcagttcaagaaagttgttttccaggaatttactgatggctcctttactcagcccttataccgtggagaactaaatgaacatttgggactcctggggccatatataagagcagaagttgaagataatatcatggtaactttcagaaatcaggcctctcgtccctattccttctattctagccttatttcttatgaggaagatcagaggcaaggagcagaacctagaaaaaactttgtcaagcctaatgaaaccaaaacttacttttggaaagtgcaacatcatatggcacccactaaagatgagtttgactgcaaagcctgggcttatttctctgatgttgacctggaaaaagatgtgcactcaggcctgattggaccccttctggtctgccacactaacacactgaaccctgctcatgggagacaagtgacagtacaggaatttgctctgtttttcaccatctttgatgagaccaaaagctggtacttcactgaaaatatggaaagaaactgcagggctccctgcaatatccagatggaagatcccacttttaaagagaattatcgcttccatgcaatcaatggctacataatggatacactacctggcttagtaatggctcaggatcaaaggattcgatggtatctgctcagcatgggcagcaatgaaaacatccattctattcatttcagtggacatgtgttcactgtacgaaaaaaagaggagtataaaatggcactgtacaatctctatccaggtgtttttgagacagtggaaatgttaccatccaaagctggaatttggcgggtggaatgccttattggcgagcatctacatgctgggatgagcacactttttctggtgtacagcaataagtgtcagactcccctgggaatggcttctggacacattagagattttcagattacagcttcaggacaatatggacagtgggccccaaagctggccagacttcattattccggatcaatcaatgcctggagcaccaaggagcccttttcttggatcaaggtggatctgttggcaccaatgattattcacggcatcaagacccagggtgcccgtcagaagttctccagcctctacatctctcagtttatcatcatgtatagtcttgatgggaagaagtggcagacttatcgaggaaattccactggaaccttaatggtcttctttggcaatgtggattcatctgggataaaacacaatatttttaaccctccaattattgctcgatacatccgtttgcacccaactcattatagcattcgcagcactcttcgcatggagttgatgggctgtgatttaaatagttgcagcatgccattgggaatggagagtaaagcaatatcagatgcacagattactgcttcatcctactttaccaatatgtttgccacctggtctccttcaaaagctcgacttcacctccaagggaggagtaatgcctggagacctcaggtgaataatccaaaagagtggctgcaagtggacttccagaagacaatgaaagtcacaggagtaactactcagggagtaaaatctctgcttaccagcatgtatgtgaaggagttcctcatctccagcagtcaagatggccatcagtggactctcttttttcagaatggcaaagtaaaggtttttcagggaaatcaagactccttcacacctgtggtgaactctctagacccaccgttactgactcgctaccttcgaattcacccccagagttgggtgcaccagattgccctgaggatggaggttctgggctgcgaggcacaggacctctac

SEQ ID NO: 9 - DNA, 7053 bp, Artificial Sequence
  synthetic construct
atgcaaatagagctctccacctgcttctttctgtgccttttgcgattctgctttagtgccaccagaagatactacctgggtgcagtggaactgtcatgggactatatgcaaagtgatctcggtgagctgcctgtggacgcaagatttcctcctagagtgccaaaatcttttccattcaacacctcagtcgtgtacaaaaagactctgtttgtagaattcacggatcaccttttcaacatcgctaagccaaggccaccctggatgggtctgctaggtcctaccatccaggctgaggtttatgatacagtggtcattacacttaagaacatggcttcccatcctgtcagtcttcatgctgttggtgtatcctactggaaagcttctgagggagctgaatatgatgatcagaccagtcaaagggagaaagaagatgataaagtcttccctggtggaagccatacatatgtctggcaggtcctgaaagagaatggtccaatggcctctgacccactgtgccttacctactcatatctttctcatgtggacctggtaaaagacttgaattcaggcctcattggagccctactagtatgtagagaagggagtctggccaaggaaaagacacagaccttgcacaaatttatactactttttgctgtatttgatgaagggaaaagttggcactcagaaacaaagaactccttgatgcaggatagggatgctgcatctgctcgggcctggcctaaaatgcacacagtcaatggttatgtaaacaggtctctgccaggtctgattggatgccacaggaaatcagtctattggcatgtgattggaatgggcaccactcctgaagtgcactcaatattcctcgaaggtcacacatttcttgtgaggaaccatcgccaggcgtccttggaaatctcgccaataactttccttactgctcaaacactcttgatggaccttggacagtttctactgttttgtcatatctcttcccaccaacatgatggcatggaagcttatgtcaaagtagacagctgtccagaggaaccccaactacgaatgaaaaataatgaagaagcggaagactatgatgatgatcttactgattctgaaatggatgtggtcaggtttgatgatgacaactctccttcctttatccaaattcgctcagttgccaagaagcatcctaaaacttgggtacattacattgctgctgaagaggaggactgggactatgctcccttagtcctcgcccccgatgacagaagttataaaagtcaatatttgaacaatggccctcagcggattggtaggaagtacaaaaaagtccgatttatggcatacacagatgaaacctttaagactcgtgaagctattcagcatgaatcaggaatcttgggacctttactttatggggaagttggagacacactgttgattatatttaagaatcaagcaagcagaccatataacatctaccctcacggaatcactgatgtccgtcctttgtattcaaggagattaccaaaaggtgtaaaacatttgaaggattttccaattctgccaggagaaatattcaaatataaatggacagtgactgtagaagatgggccaactaaatcagatcctcggtgcctgacccgctattactctagtttcgttaatatggagagagatctagcttcaggactcattggccctctcctcatctgctacaaagaatctgtagatcaaagaggaaaccagataatgtcagacaagaggaatgtcatcctgttttctgtatttgatgagaaccgaagctggtacctcacagagaatatacaacgctttctccccaatccagctggagtgcagcttgaggatccagagttccaagcctccaacatcatgcacagcatcaatggctatgtttttgatagtttgcagttgtcagtttgtttgcatgaggtggcatactggtacattctaagcattggagcacagactgacttcctttctgtcttcttctctggatataccttcaaacacaaaatggtctatgaagacacactcaccctattcccattctcaggagaaactgtcttcatgtcgatggaaaacccaggtctatggattctggggtgccacaactcagactttcggaacagaggcatgaccgccttactgaaggtttctagttgtgacaagaacactggtgattattacgaggacagttatgaagatatttcagcatacttgctgagtaaaaacaatgccattgaaccaagaagcttctcccagaattcaagacaccctagcactaggcaaaagcaatttaatgccaccacaattccagaaaatgacatagagaagactgacccttggtttgcacacagaacacctatgcctaaaatacaaaatgtctcctctagtgatttgttgatgctcttgcgacagagtcctactccacatgggctatccttatctgatctccaagaagccaaatatgagactttttctgatgatccatcacctggagcaatagacagtaataacagcctgtctgaaatgacacacttcaggccacagctccatcacagtggggacatggtatttacccctgagtcaggcctccaattaagattaaatgagaaactggggacaactgcagcaacagagttgaagaaacttgatttcaaagtttctagtacatcaaataatctgatttcaacaattccatcagacaatttggcagcaggtactgataatacaagttccttaggacccccaagtatgccagttcattatgatagtcaattagataccactctatttggcaaaaagtcatctccccttactgagtctggtggacctctgagcttgagtgaagaaaataatgattcaaagttgttagaatcaggtttaatgaatagccaagaaagttcatggggaaaaaatgtatcgtcaacagagagtggtaggttatttaaagggaaaagagctcatggacctgctttgttgactaaagataatgccttattcaaagttagcatctctttgttaaagacaaacaaaacttccaataattcagcaactaatagaaagactcacattgatggcccatcattattaattgagaatagtccatcagtctggcaaaatatattagaaagtgacactgagtttaaaaaagtgacacctttgattcatgacagaatgcttatggacaaaaatgctacagctttgaggctaaatcatatgtcaaataaaactacttcatcaaaaaacatggaaatggtccaacagaaaaaagagggccccattccaccagatgcacaaaatccagatatgtcgttctttaagatgctattcttgccagaatcagcaaggtggatacaaaggactcatggaaagaactctctgaactctgggcaaggccccagtccaaagcaattagtatccttaggaccagaaaaatctgtggaaggtcagaatttcttgtctgagaaaaacaaagtggtagtaggaaagggtgaatttacaaaggacgtaggactcaaagagatggtttttccaagcagcagaaacctatttcttactaacttggataatttacatgaaaataatacacacaatcaagaaaaaaaaattcaggaagaaatagaaaagaaggaaacattaatccaagagaatgtagttttgcctcagatacatacagtgactggcactaagaatttcatgaagaaccttttcttactgagcactaggcaaaatgtagaaggttcatatgagggggcatatgctccagtacttcaagattttaggtcattaaatgattcaacaaatagaacaaagaaacacacagctcatttctcaaaaaaaggggaggaagaaaacttggaaggcttgggaaatcaaaccaagcaaattgtagagaaatatgcatgcaccacaaggatatctcctaatacaagccagcagaattttgtcacgcaacgtagtaagagagctttgaaacaattcagactcccactagaagaaacagaacttgaaaaaaggataattgtggatgacacctcaacccagtggtccaaaaacatgaaacatttgaccccgagcaccctcacacagatagactacaatgagaaggagaaaggggccattactcagtctcccttatcagattgccttacgaggagtcatagcatccctcaagcaaatagatctccattacccattgcaaaggtatcatcatttccatctattagacctatatatctgaccagggtcctattccaagacaactcttctcatcttccagcagcatcttatagaaagaaagattctggggtccaagaaagcagtcatttcttacaaggagccaaaaaaaataacctttctttagccattctaaccttggagatgactggtgatcaaagagaggttggctccctggggacaagtgccacaaattcagtcacatacaagaaagttgagaacactgttctcccgaaaccagacttgcccaaaacatctggcaaagttgaattgcttccaaaagttcacatttatcagaaggacctattccctacggaaactagcaatgggtctcctggccatctggatctcgtggaagggagccttcttcagggaacagagggagcgattaagtggaatgaagcaaacagacctggaaaagttccctttctgagagtagcaacagaaagctctgcaaagactccctccaagctattggatcctcttgcttgggataaccactatggtactcagataccaaaagaagagtggaaatcccaagagaagtcaccagaaaaaacagcttttaagaaaaaggataccattttgtccctgaacgcttgtgaaagcaatcatgcaatagcagcaataaatgagggacaaaataagcccgaaatagaagtcacctgggcaaagcaaggtaggactgaaaggctgtgctctcaaaacccaccagtcttgaaacgccatcaacgggaaataactcgtactactcttcagtcagatcaagaggaaattgactatgatgataccatatcagttgaaatgaagaaggaagattttgacatttatgatgaggatgaaaatcagagcccccgcagctttcaaaagaaaacacgacactattttattgctgcagtggagaggctctgggattatgggatgagtagctccccacatgttctaagaaacagggctcagagtggcagtgtccctcagttcaagaaagttgttttccaggaatttactgatggctcctttactcagcccttataccgtggagaactaaatgaacatttgggactcctggggccatatataagagcagaagttgaagataatatcatggtaactttcagaaatcaggcctctcgtccctattccttctattctagccttatttcttatgaggaagatcagaggcaaggagcagaacctagaaaaaactttgtcaagcctaatgaaaccaaaacttacttttggaaagtgcaacatcatatggcacccactaaagatgagtttgactgcaaagcctgggcttatttctctgatgttgacctggaaaaagatgtgcactcaggcctgattggaccccttctggtctgccacactaacacactgaaccctgctcatgggagacaagtgacagtacaggaatttgctctgtttttcaccatctttgatgagaccaaaagctggtacttcactgaaaatatggaaagaaactgcagggctccctgcaatatccagatggaagatcccacttttaaagagaattatcgcttccatgcaatcaatggctacataatggatacactacctggcttagtaatggctcaggatcaaaggattcgatggtatctgctcagcatgggcagcaatgaaaacatccattctattcatttcagtggacatgtgttcactgtacgaaaaaaagaggagtataaaatggcactgtacaatctctatccaggtgtttttgagacagtggaaatgttaccatccaaagctggaatttggcgggtggaatgccttattggcgagcatctacatgctgggatgagcacactttttctggtgtacagcaataagtgtcagactcccctgggaatggcttctggacacattagagattttcagattacagcttcaggacaatatggacagtgggccccaaagctggccagacttcattattccggatcaatcaatgcctggagcaccaaggagcccttttcttggatcaaggtggatctgttggcaccaatgattattcacggcatcaagacccagggtgcccgtcagaagttctccagcctctacatctctcagtttatcatcatgtatagtcttgatgggaagaagtggcagacttatcgaggaaattccactggaaccttaatggtcttctttggcaatgtggattcatctgggataaaacacaatatttttaaccctccaattattgctcgatacatccgtttgcacccaactcattatagcattcgcagcactcttcgcatggagttgatgggctgtgatttaaatagttgcagcatgccattgggaatggagagtaaagcaatatcagatgcacagattactgcttcatcctactttaccaatatgtttgccacctggtctccttcaaaagctcgacttcacctccaagggaggagtaatgcctggagacctcaggtgaataatccaaaagagtggctgcaagtggacttccagaagacagtgaaagtcacaggagtaactactcagggagtaaaatctctgcttaccagcatgtatgtgaaggagttcctcatctccagcagtcaagatggccatcagtggactctcttttttcagaatggcaaagtaaaggtttttcagggaaatcaagactccttcacacctgtggtgaactctctagacccaccgttactgactcgctaccttcgaattcacccccagagttgggtgcaccagattgccctgaggatggaggttctgggctgcgaggcacaggacctctac

SEQ ID NO: 10 - DNA, 7053 bp, Artificial Sequence
  synthetic construct
atgcaaatagagctctccacctgcttctttctgtgccttttgcgattctgctttagtgccaccagaagatactacctgggtgcagtggaactgtcatgggactatatgcaaagtgatctcggtgagctgcctgtggacgcaagatttcctcctagagtgccaaaatcttttccattcaacacctcagtcgtgtacaaaaagactctgtttgtagaattcacggatcaccttttcaacatcgctaagccaaggccaccctggatgggtctgctaggtcctaccatccaggctgaggtttatgatacagtggtcattacacttaagaacatggcttcccatcctgtcagtcttcatgctgttggtgtatcctactggaaagcttctgagggagctgaatatgatgatcagaccagtcaaagggagaaagaagatgataaagtcttccctggtggaagccatacatatgtctggcaggtcctgaaagagaatggtccaatggcctctgacccactgtgccttacctactcatatctttctcatgtggacctggtaaaagacttgaattcaggcctcattggagccctactagtatgtagagaagggagtctggccaaggaaaagacacagaccttgcacaaatttatactactttttgctgtatttgatgaagggaaaagttggcactcagaaacaaagaactccttgatgcaggatagggatgctgcatctgctcgggcctggcctaaaatgcacacagtcaatggttatgtaaacaggtctctgccaggtctgattggatgccacaggaaatcagtctattggcatgtgattggaatgggcaccactcctgaagtgcactcaatattcctcgaaggtcacacatttcttgtgaggaaccatcgccaggcgtccttggaaatctcgccaataactttccttactgctcaaacactcttgatggaccttggacagtttctactgttttgtcatatctcttcccaccaacatgatggcatggaagcttatgtcaaagtagacagctgtccagaggaaccccaactacgaatgaaaaataatgaagaagcggaagactatgatgatgatcttactgattctgaaatggatgtggtcaggtttgatgatgacaactctccttcctttatccaaattcgctcagttgccaagaagcatcctaaaacttgggtacattacattgctgctgaagaggaggactgggactatgctcccttagtcctcgcccccgatgacagaagttataaaagtcaatatttgaacaatggccctcagcggattggtaggaagtacaaaaaagtccgatttatggcatacacagatgaaacctttaagactcgtgaagctattcagcatgaatcaggaatcttgggacctttactttatggggaagttggagacacactgttgattatatttaagaatcaagcaagcagaccatataacatctaccctcacggaatcactgatgtccatcctttgtattcaaggagattaccaaaaggtgtaaaacatttgaaggattttccaattctgccaggagaaatattcaaatataaatggacagtgactgtagaagatgggccaactaaatcagatcctcggtgcctgacccgctattactctagtttcgttaatatggagagagatctagcttcaggactcattggccctctcctcatctgctacaaagaatctgtagatcaaagaggaaaccagataatgtcagacaagaggaatgtcatcctgttttctgtatttgatgagaaccgaagctggtacctcacagagaatatacaacgctttctccccaatccagctggagtgcagcttgaggatccagagttccaagcctccaacatcatgcacagcatcaatggctatgtttttgatagtttgcagttgtcagtttgtttgcatgaggtggcatactggtacattctaagcattggagcacagactgacttcctttctgtcttcttctctggatataccttcaaacacaaaatggtctatgaagacacactcaccctattcccattctcaggagaaactgtcttcatgtcgatggaaaacccaggtctatggattctggggtgccacaactcagactttcggaacagaggcatgaccgccttactgaaggtttctagttgtgacaagaacactggtgattattacgaggacagttatgaagatatttcagcatacttgctgagtaaaaacaatgccattgaaccaagaagcttctcccagaattcaagacaccctagcactaggcaaaagcaatttaatgccaccacaattccagaaaatgacatagagaagactgacccttggtttgcacacagaacacctatgcctaaaatacaaaatgtctcctctagtgatttgttgatgctcttgcgacagagtcctactccacatgggctatccttatctgatctccaagaagccaaatatgagactttttctgatgatccatcacctggagcaatagacagtaataacagcctgtctgaaatgacacacttcaggccacagctccatcacagtggggacatggtatttacccctgagtcaggcctccaattaagattaaatgagaaactggggacaactgcagcaacagagttgaagaaacttgatttcaaagtttctagtacatcaaataatctgatttcaacaattccatcagacaatttggcagcaggtactgataatacaagttccttaggacccccaagtatgccagttcattatgatagtcaattagataccactctatttggcaaaaagtcatctccccttactgagtctggtggacctctgagcttgagtgaagaaaataatgattcaaagttgttagaatcaggtttaatgaatagccaagaaagttcatggggaaaaaatgtatcgtcaacagagagtggtaggttatttaaagggaaaagagctcatggacctgctttgttgactaaagataatgccttattcaaagttagcatctctttgttaaagacaaacaaaacttccaataattcagcaactaatagaaagactcacattgatggcccatcattattaattgagaatagtccatcagtctggcaaaatatattagaaagtgacactgagtttaaaaaagtgacacctttgattcatgacagaatgcttatggacaaaaatgctacagctttgaggctaaatcatatgtcaaataaaactacttcatcaaaaaacatggaaatggtccaacagaaaaaagagggccccattccaccagatgcacaaaatccagatatgtcgttctttaagatgctattcttgccagaatcagcaaggtggatacaaaggactcatggaaagaactctctgaactctgggcaaggccccagtccaaagcaattagtatccttaggaccagaaaaatctgtggaaggtcagaatttcttgtctgagaaaaacaaagtggtagtaggaaagggtgaatttacaaaggacgtaggactcaaagagatggtttttccaagcagcagaaacctatttcttactaacttggataatttacatgaaaataatacacacaatcaagaaaaaaaaattcaggaagaaatagaaaagaaggaaacattaatccaagagaatgtagttttgcctcagatacatacagtgactggcactaagaatttcatgaagaaccttttcttactgagcactaggcaaaatgtagaaggttcatatgagggggcatatgctccagtacttcaagattttaggtcattaaatgattcaacaaatagaacaaagaaacacacagctcatttctcaaaaaaaggggaggaagaaaacttggaaggcttgggaaatcaaaccaagcaaattgtagagaaatatgcatgcaccacaaggatatctcctaatacaagccagcagaattttgtcacgcaacgtagtaagagagctttgaaacaattcagactcccactagaagaaacagaacttgaaaaaaggataattgtggatgacacctcaacccagtggtccaaaaacatgaaacatttgaccccgagcaccctcacacagatagactacaatgagaaggagaaaggggccattactcagtctcccttatcagattgccttacgaggagtcatagcatccctcaagcaaatagatctccattacccattgcaaaggtatcatcatttccatctattagacctatatatctgaccagggtcctattccaagacaactcttctcatcttccagcagcatcttatagaaagaaagattctggggtccaagaaagcagtcatttcttacaaggagccaaaaaaaataacctttctttagccattctaaccttggagatgactggtgatcaaagagaggttggctccctggggacaagtgccacaaattcagtcacatacaagaaagttgagaacactgttctcccgaaaccagacttgcccaaaacatctggcaaagttgaattgcttccaaaagttcacatttatcagaaggacctattccctacggaaactagcaatgggtctcctggccatctggatctcgtggaagggagccttcttcagggaacagagggagcgattaagtggaatgaagcaaacagacctggaaaagttccctttctgagagtagcaacagaaagctctgcaaagactccctccaagctattggatcctcttgcttgggataaccactatggtactcagataccaaaagaagagtggaaatcccaagagaagtcaccagaaaaaacagcttttaagaaaaaggataccattttgtccctgaacgcttgtgaaagcaatcatgcaatagcagcaataaatgagggacaaaataagcccgaaatagaagtcacctgggcaaagcaaggtaggactgaaaggctgtgctctcaaaacccaccagtcttgaaacgccatcaacgggaaataactcgtactactcttcagtcagatcaagaggaaattgactatgatgataccatatcagttgaaatgaagaaggaagattttgacatttatgatgaggatgaaaatcagagcccccgcagctttcaaaagaaaacacgacactattttattgctgcagtggagaggctctgggattatgggatgagtagctccccacatgttctaagaaacagggctcagagtggcagtgtccctcagttcaagaaagttgttttccaggaatttactgatggctcctttactcagcccttataccgtggagaactaaatgaacatttgggactcctggggccatatataagagcagaagttgaagataatatcatggtaactttcagaaatcaggcctctcgtccctattccttctattctagccttatttcttatgaggaagatcagaggcaaggagcagaacctagaaaaaactttgtcaagcctaatgaaaccaaaacttacttttggaaagtgcaacatcatatggcacccactaaagatgagtttgactgcaaagcctgggcttatttctctgatgttgacctggaaaaagatgtgcactcaggcctgattggaccccttctggtctgccacactaacacactgaaccctgctcatgggagacaagtgacagtacaggaatttgctctgtttttcaccatctttgatgagaccaaaagctggtacttcactgaaaatatggaaagaaactgcagggctccctgcaatatccagatggaagatcccacttttaaagagaattatcgcttccatgcaatcaatggctacataatggatacactacctggcttagtaatggctcaggatcaaaggattcgatggtatctgctcagcatgggcagcaatgaaaacatccattctattcatttcagtggacatgtgttcactgtacgaaaaaaagaggagtataaaatggcactgtacaatctctatccaggtgtttttgagacagtggaaatgttaccatccaaagctggaatttggcgggtggaatgccttattggcgagcatctacatgctgggatgagcacactttttctggtgtacagcaataagtgtcagactcccctgggaatggcttctggacacattagagattttcagattacagcttcaggacaatatggacagtgggccccaaagctggccagacttcattattccggatcaatcaatgcctggagcaccaaggagcccttttcttggatcaaggtggatctgttggcaccaatgattattcacggcatcaagacccagggtgcccgtcagaagttctccagcctctacatctctcagtttatcatcatgtatagtcttgatgggaagaagtggcagacttatcgaggaaattccactggaaccttaatggtcttctttggcaatgtggattcatctgggataaaacacaatatttttaaccctccaattattgctcgatacatccgtttgcacccaactcattatagcattcgcagcactcttcgcatggagttgatgggctgtgatttaaatagttgcagcatgccattgggaatggagagtaaagcaatatcagatgcacagattactgcttcatcctactttaccaatatgtttgccacctggtctccttcaaaagctcgacttcacctccaagggaggagtaatgcctggagacctcaggtgaataatccaaaagagtggctgcaagtggacttccagaagacaatgaaagtcacaggagtaactactcagggagtaaaatctctgcttaccagcatgtatgtgaaggagttcctcatctccagcagtcaagatggccatcagtggactctcttttttcagaatggcaaagtaaaggtttttcagggaaatcaagactccttcacacctgtggtgaactctctagacccaccgttactgactcgctaccttcgaattcacccccagagttgggtgcaccagattgccctgaggatggaggttctgggctgcgaggcacaggacctctac

SEQ ID NO: 11 - DNA, 7053 bp, Artificial Sequence
  synthetic construct
atgcaaatagagctctccacctgcttctttctgtgccttttgcgattctgctttagtgccaccagaagatactacctgggtgcagtggaactgtcatgggactatatgcaaagtgatctcggtgagctgcctgtggacgcaagatttcctcctagagtgccaaaatcttttccattcaacacctcagtcgtgtacaaaaagactctgtttgtagaattcacggatcaccttttcaacatcgctaagccaaggccaccctggatgggtctgctaggtcctaccatccaggctgaggtttatgatacagtggtcattacacttaagaacatggcttcccatcctgtcagtcttcatgctgttggtgtatcctactggaaagcttctgagggagctgaatatgatgatcagaccagtcaaagggagaaagaagatgataaagtcttccctggtggaagccatacatatgtctggcaggtcctgaaagagaatggtccaatggcctctgacccactgtgccttacctactcatatctttctcatgtggacctggtaaaagacttgaattcaggcctcattggagccctactagtatgtagagaagggagtctggccaaggaaaagacacagaccttgcacaaatttatactactttttgctgtatttgatgaagggaaaagttggcactcagaaacaaagaactccttgatgcaggatagggatgctgcatctgctcgggcctggcctaaaatgcacacagtcaatggttatgtaaacaggtctctgccaggtctgattggatgccacaggaaatcagtctattggcatgtgattggaatgggcaccactcctgaagtgcactcaatattcctcgaaggtcacacatttcttgtgaggaaccatcgccaggcgtccttggaaatctcgccaataactttccttactgctcaaacactcttgatggaccttggacagtttctactgttttgtcatatctcttcccaccaacatgatggcatggaagcttatgtcaaagtagacagctgtccagaggaaccccaactacgaatgaaaaataatgaagaagcggaagactatgatgatgatcttactgattctgaaatggatgtggtcaggtttgatgatgacaactctccttcctttatccaaattcgctcagttgccaagaagcatcctaaaacttgggtacattacattgctgctgaagaggaggactgggactatgctcccttagtcctcgcccccgatgacagaagttataaaagtcaatatttgaacaatggccctcagcggattggtaggaagtacaaaaaagtccgatttatggcatacacagatgaaacctttaagactcgtgaagctattcagcatgaatcaggaatcttgggacctttactttatggggaagttggagacacactgttgattatatttaagaatcaagcaagcagaccatataacatctaccctcacggaatcactgatgtccgtcctttgtattcaaggagattaccaaaaggtgtaaaacatttgaaggattttccaattctgccaggagaaatattcaaatataaatggacagtgactgtagaagatgggccaactaaatcagatcctcggtgcctgacccgctattactctagtttcgttaatatggagagagatctagcttcaggactcattggccctctcctcatctgctacaaagaatctgtagatcaaagaggaaaccagataatgtcagacaagaggaatgtcatcctgttttctgtatttgatgagaaccgaagctggtacctcacagagaatatacaacgctttctccccaatccagctggagtgcagcttgaggatccagagttccaagcctccaacatcatgcacagcatcaatggctatgtttttgatagtttgcagttgtcagtttgtttgcatgaggtggcatactggtacattctaagcattggagcacagactgacttcctttctgtcttcttctctggatataccttcaaacacaaaatggtctatgaagacacactcaccctattcccattctcaggagaaactgtcttcatgtcgatggaaaacccaggtctatggattctggggtgccacaactcagactttcggaacagaggcatgaccgccttactgaaggtttctagttgtgacaagaacactggtgattattacgaggacagttatgaagatatttcagcatacttgctgagtaaaaacaatgccattgaaccaagaagcttctcccagaattcaagacaccctagcactaggcaaaagcaatttaatgccaccacaattccagaaaatgacatagagaagactgacccttggtttgcacacagaacacctatgcctaaaatacaaaatgtctcctctagtgatttgttgatgctcttgcgacagagtcctactccacatgggctatccttatctgatctccaagaagccaaatatgagactttttctgatgatccatcacctggagcaatagacagtaataacagcctgtctgaaatgacacacttcaggccacagctccatcacagtggggacatggtatttacccctgagtcaggcctccaattaagattaaatgagaaactggggacaactgcagcaacagagttgaagaaacttgatttcaaagtttctagtacatcaaataatctgatttcaacaattccatcagacaatttggcagcaggtactgataatacaagttccttaggacccccaagtatgccagttcattatgatagtcaattagataccactctatttggcaaaaagtcatctccccttactgagtctggtggacctctgagcttgagtgaagaaaataatgattcaaagttgttagaatcaggtttaatgaatagccaagaaagttcatggggaaaaaatgtatcgtcaacagagagtggtaggttatttaaagggaaaagagctcatggacctgctttgttgactaaagataatgccttattcaaagttagcatctctttgttaaagacaaacaaaacttccaataattcagcaactaatagaaagactcacattgatggcccatcattattaattgagaatagtccatcagtctggcaaaatatattagaaagtgacactgagtttaaaaaagtgacacctttgattcatgacagaatgcttatggacaaaaatgctacagctttgaggctaaatcatatgtcaaataaaactacttcatcaaaaaacatggaaatggtccaacagaaaaaagagggccccattccaccagatgcacaaaatccagatatgtcgttctttaagatgctattcttgccagaatcagcaaggtggatacaaaggactcatggaaagaactctctgaactctgggcaaggccccagtccaaagcaattagtatccttaggaccagaaaaatctgtggaaggtcagaatttcttgtctgagaaaaacaaagtggtagtaggaaagggtgaatttacaaaggacgtaggactcaaagagatggtttttccaagcagcagaaacctatttcttactaacttggataatttacatgaaaataatacacacaatcaagaaaaaaaaattcaggaagaaatagaaaagaaggaaacattaatccaagagaatgtagttttgcctcagatacatacagtgactggcactaagaatttcatgaagaaccttttcttactgagcactaggcaaaatgtagaaggttcatatgacggggcatatgctccagtacttcaagattttaggtcattaaatgattcaacaaatagaacaaagaaacacacagctcatttctcaaaaaaaggggaggaagaaaacttggaaggcttgggaaatcaaaccaagcaaattgtagagaaatatgcatgcaccacaaggatatctcctaatacaagccagcagaattttgtcacgcaacgtagtaagagagctttgaaacaattcagactcccactagaagaaacagaacttgaaaaaaggataattgtggatgacacctcaacccagtggtccaaaaacatgaaacatttgaccccgagcaccctcacacagatagactacaatgagaaggagaaaggggccattactcagtctcccttatcagattgccttacgaggagtcatagcatccctcaagcaaatagatctccattacccattgcaaaggtatcatcatttccatctattagacctatatatctgaccagggtcctattccaagacaactcttctcatcttccagcagcatcttatagaaagaaagattctggggtccaagaaagcagtcatttcttacaaggagccaaaaaaaataacctttctttagccattctaaccttggagatgactggtgatcaaagagaggttggctccctggggacaagtgccacaaattcagtcacatacaagaaagttgagaacactgttctcccgaaaccagacttgcccaaaacatctggcaaagttgaattgcttccaaaagttcacatttatcagaaggacctattccctacggaaactagcaatgggtctcctggccatctggatctcgtggaagggagccttcttcagggaacagagggagcgattaagtggaatgaagcaaacagacctggaaaagttccctttctgagagtagcaacagaaagctctgcaaagactccctccaagctattggatcctcttgcttgggataaccactatggtactcagataccaaaagaagagtggaaatcccaagagaagtcaccagaaaaaacagcttttaagaaaaaggataccattttgtccctgaacgcttgtgaaagcaatcatgcaatagcagcaataaatgagggacaaaataagcccgaaatagaagtcacctgggcaaagcaaggtaggactgaaaggctgtgctctcaaaacccaccagtcttgaaacgccatcaacgggaaataactcgtactactcttcagtcagatcaagaggaaattgactatgatgataccatatcagttgaaatgaagaaggaagattttgacatttatgatgaggatgaaaatcagagcccccgcagctttcaaaagaaaacacgacactattttattgctgcagtggagaggctctgggattatgggatgagtagctccccacatgttctaagaaacagggctcagagtggcagtgtccctcagttcaagaaagttgttttccaggaatttactgatggctcctttactcagcccttataccgtggagaactaaatgaacatttgggactcctggggccatatataagagcagaagttgaagataatatcatggtaactttcagaaatcaggcctctcgtccctattccttctattctagccttatttcttatgaggaagatcagaggcaaggagcagaacctagaaaaaactttgtcaagcctaatgaaaccaaaacttacttttggaaagtgcaacatcatatggcacccactaaagatgagtttgactgcaaagcctgggcttatttctctgatgttgacctggaaaaagatgtgcactcaggcctgattggaccccttctggtctgccacactaacacactgaaccctgctcatgggagacaagtgacagtacaggaatttgctctgtttttcaccatctttgatgagaccaaaagctggtacttcactgaaaatatggaaagaaactgcagggctccctgcaatatccagatggaagatcccacttttaaagagaattatcgcttccatgcaatcaatggctacataatggatacactacctggcttagtaatggctcaggatcaaaggattcgatggtatctgctcagcatgggcagcaatgaaaacatccattctattcatttcagtggacatgtgttcactgtacgaaaaaaagaggagtataaaatggcactgtacaatctctatccaggtgtttttgagacagtggaaatgttaccatccaaagctggaatttggcgggtggaatgccttattggcgagcatctacatgctgggatgagcacactttttctggtgtacagcaataagtgtcagactcccctgggaatggcttctggacacattagagattttcagattacagcttcaggacaatatggacagtgggccccaaagctggccagacttcattattccggatcaatcaatgcctggagcaccaaggagcccttttcttggatcaaggtggatctgttggcaccaatgattattcacggcatcaagacccagggtgcccgtcagaagttctccagcctctacatctctcagtttatcatcatgtatagtcttgatgggaagaagtggcagacttatcgaggaaattccactggaaccttaatggtcttctttggcaatgtggattcatctgggataaaacacaatatttttaaccctccaattattgctcgatacatccgtttgcacccaactcattatagcattcgcagcactcttcgcatggagttgatgggctgtgatttaaatagttgcagcatgccattgggaatggagagtaaagcaatatcagatgcacagattactgcttcatcctactttaccaatatgtttgccacctggtctccttcaaaagctcgacttcacctccaagggaggagtaatgcctggagacctcaggtgaataatccaaaagagtggctgcaagtggacttccagaagacagtgaaagtcacaggagtaactactcagggagtaaaatctctgcttaccagcatgtatgtgaaggagttcctcatctccagcagtcaagatggccatcagtggactctcttttttcagaatggcaaagtaaaggtttttcagggaaatcaagactccttcacacctgtggtgaactctctagacccaccgttactgactcgctaccttcgaattcacccccagagttgggtgcaccagattgccctgaggatggaggttctgggctgcgaggcacaggacctctac

SEQ ID NO: 12 - DNA, 7053 bp, Artificial Sequence
  synthetic construct
atgcaaatagagctctccacctgcttctttctgtgccttttgcgattctgctttagtgccaccagaagatactacctgggtgcagtggaactgtcatgggactatatgcaaagtgatctcggtgagctgcctgtggacgcaagatttcctcctagagtgccaaaatcttttccattcaacacctcagtcgtgtacaaaaagactctgtttgtagaattcacggatcaccttttcaacatcgctaagccaaggccaccctggatgggtctgctaggtcctaccatccaggctgaggtttatgatacagtggtcattacacttaagaacatggcttcccatcctgtcagtcttcatgctgttggtgtatcctactggaaagcttctgagggagctgaatatgatgatcagaccagtcaaagggagaaagaagatgataaagtcttccctggtggaagccatacatatgtctggcaggtcctgaaagagaatggtccaatggcctctgacccactgtgccttacctactcatatctttctcatgtggacctggtaaaagacttgaattcaggcctcattggagccctactagtatgtagagaagggagtctggccaaggaaaagacacagaccttgcacaaatttatactactttttgctgtatttgatgaagggaaaagttggcactcagaaacaaagaactccttgatgcaggatagggatgctgcatctgctcgggcctggcctaaaatgcacacagtcaatggttatgtaaacaggtctctgccaggtctgattggatgccacaggaaatcagtctattggcatgtgattggaatgggcaccactcctgaagtgcactcaatattcctcgaaggtcacacatttcttgtgaggaaccatcgccaggcgtccttggaaatctcgccaataactttccttactgctcaaacactcttgatggaccttggacagtttctactgttttgtcatatctcttcccaccaacatgatggcatggaagcttatgtcaaagtagacagctgtccagaggaaccccaactacgaatgaaaaataatgaagaagcggaagactatgatgatgatcttactgattctgaaatggatgtggtcaggtttgatgatgacaactctccttcctttatccaaattcgctcagttgccaagaagcatcctaaaacttgggtacattacattgctgctgaagaggaggactgggactatgctcccttagtcctcgcccccgatgacagaagttataaaagtcaatatttgaacaatggccctcagcggattggtaggaagtacaaaaaagtccgatttatggcatacacagatgaaacctttaagactcgtgaagctattcagcatgaatcaggaatcttgggacctttactttatggggaagttggagacacactgttgattatatttaagaatcaagcaagcagaccatataacatctaccctcacggaatcactgatgtccgtcctttgtattcaaggagattaccaaaaggtgtaaaacatttgaaggattttccaattctgccaggagaaatattcaaatataaatggacagtgactgtagaagatgggccaactaaatcagatcctcggtgcctgacccgctattactctagtttcgttaatatggagagagatctagcttcaggactcattggccctctcctcatctgctacaaagaatctgtagatcaaagaggaaaccagataatgtcagacaagaggaatgtcatcctgttttctgtatttgatgagaaccgaagctggtacctcacagagaatatacaacgctttctccccaatccagctggagtgcagcttgaggatccagagttccaagcctccaacatcatgcacagcatcaatggctatgtttttgatagtttgcagttgtcagtttgtttgcatgaggtggcatactggtacattctaagcattggagcacagactgacttcctttctgtcttcttctctggatataccttcaaacacaaaatggtctatgaagacacactcaccctattcccattctcaggagaaactgtcttcatgtcgatggaaaacccaggtctatggattctggggtgccacaactcagactttcggaacagaggcatgaccgccttactgaaggtttctagttgtgacaagaacactggtgattattacgaggacagttatgaagatatttcagcatacttgctgagtaaaaacaatgccattgaaccaagaagcttctcccagaattcaagacaccctagcactaggcaaaagcaatttaatgccaccacaattccagaaaatgacatagagaagactgacccttggtttgcacacggaacacctatgcctaaaatacaaaatgtctcctctagtgatttgttgatgctcttgcgacagagtcctactccacatgggctatccttatctgatctccaagaagccaaatatgagactttttctgatgatccatcacctggagcaatagacagtaataacagcctgtctgaaatgacacacttcaggccacagctccatcacagtggggacatggtatttacccctgagtcaggcctccaattaagattaaatgagaaactggggacaactgcagcaacagagttgaagaaacttgatttcaaagtttctagtacatcaaataatctgatttcaacaattccatcagacaatttggcagcaggtactgataatacaagttccttaggacccccaagtatgccagttcattatgatagtcaattagataccactctatttggcaaaaagtcatctccccttactgagtctggtggacctctgagcttgagtgaagaaaataatgattcaaagttgttagaatcaggtttaatgaatagccaagaaagttcatggggaaaaaatgtatcgtcaacagagagtggtaggttatttaaagggaaaagagctcatggacctgctttgttgactaaagataatgccttattcaaagttagcatctctttgttaaagacaaacaaaacttccaataattcagcaactaatagaaagactcacattgatggcccatcattattaattgagaatagtccatcagtctggcaaaatatattagaaagtgacactgagtttaaaaaagtgacacctttgattcatgacagaatgcttatggacaaaaatgctacagctttgaggctaaatcatatgtcaaataaaactacttcatcaaaaaacatggaaatggtccaacagaaaaaagagggccccattccaccagatgcacaaaatccagatatgtcgttctttaagatgctattcttgccagaatcagcaaggtggatacaaaggactcatggaaagaactctctgaactctgggcaaggccccagtccaaagcaattagtatccttaggaccagaaaaatctgtggaaggtcagaatttcttgtctgagaaaaacaaagtggtagtaggaaagggtgaatttacaaaggacgtaggactcaaagagatggtttttccaagcagcagaaacctatttcttactaacttggataatttacatgaaaataatacacacaatcaagaaaaaaaaattcaggaagaaatagaaaagaaggaaacattaatccaagagaatgtagttttgcctcagatacatacagtgactggcactaagaatttcatgaagaaccttttcttactgagcactaggcaaaatgtagaaggttcatatgagggggcatatgctccagtacttcaagattttaggtcattaaatgattcaacaaatagaacaaagaaacacacagctcatttctcaaaaaaaggggaggaagaaaacttggaaggcttgggaaatcaaaccaagcaaattgtagagaaatatgcatgcaccacaaggatatctcctaatacaagccagcagaattttgtcacgcaacgtagtaagagagctttgaaacaattcagactcccactagaagaaacagaacttgaaaaaaggataattgtggatgacacctcaacccagtggtccaaaaacatgaaacatttgaccccgagcaccctcacacagatagactacaatgagaaggagaaaggggccattactcagtctcccttatcagattgccttacgaggagtcatagcatccctcaagcaaatagatctccattacccattgcaaaggtatcatcatttccatctattagacctatatatctgaccagggtcctattccaagacaactcttctcatcttccagcagcatcttatagaaagaaagattctggggtccaagaaagcagtcatttcttacaaggagccaaaaaaaataacctttctttagccattctaaccttggagatgactggtgatcaaagagaggttggctccctggggacaagtgccacaaattcagtcacatacaagaaagttgagaacactgttctcccgaaaccagacttgcccaaaacatctggcaaagttgaattgcttccaaaagttcacatttatcagaaggacctattccctacggaaactagcaatgggtctcctggccatctggatctcgtggaagggagccttcttcagggaacagagggagcgattaagtggaatgaagcaaacagacctggaaaagttccctttctgagagtagcaacagaaagctctgcaaagactccctccaagctattggatcctcttgcttgggataaccactatggtactcagataccaaaagaagagtggaaatcccaagagaagtcaccagaaaaaacagcttttaagaaaaaggataccattttgtccctgaacgcttgtgaaagcaatcatgcaatagcagcaataaatgagggacaaaataagcccgaaatagaagtcacctgggcaaagcaaggtaggactgaaaggctgtgctctcaaaacccaccagtcttgaaacgccatcaacgggaaataactcgtactactcttcagtcagatcaagaggaaattgactatgatgataccatatcagttgaaatgaagaaggaagattttgacatttatgatgaggatgaaaatcagagcccccgcagctttcaaaagaaaacacgacactattttattgctgcagtggagaggctctgggattatgggatgagtagctccccacatgttctaagaaacagggctcagagtggcagtgtccctcagttcaagaaagttgttttccaggaatttactgatggctcctttactcagcccttataccgtggagaactaaatgaacatttgggactcctggggccatatataagagcagaagttgaagataatatcatggtaactttcagaaatcaggcctctcgtccctattccttctattctagccttatttcttatgaggaagatcagaggcaaggagcagaacctagaaaaaactttgtcaagcctaatgaaaccaaaacttacttttggaaagtgcaacatcatatggcacccactaaagatgagtttgactgcaaagcctgggcttatttctctgatgttgacctggaaaaagatgtgcactcaggcctgattggaccccttctggtctgccacactaacacactgaaccctgctcatgggagacaagtgacagtacaggaatttgctctgtttttcaccatctttgatgagaccaaaagctggtacttcactgaaaatatggaaagaaactgcagggctccctgcaatatccagatggaagatcccacttttaaagagaattatcgcttccatgcaatcaatggctacataatggatacactacctggcttagtaatggctcaggatcaaaggattcgatggtatctgctcagcatgggcagcaatgaaaacatccattctattcatttcagtggacatgtgttcactgtacgaaaaaaagaggagtataaaatggcactgtacaatctctatccaggtgtttttgagacagtggaaatgttaccatccaaagctggaatttggcgggtggaatgccttattggcgagcatctacatgctgggatgagcacactttttctggtgtacagcaataagtgtcagactcccctgggaatggcttctggacacattagagattttcagattacagcttcaggacaatatggacagtgggccccaaagctggccagacttcattattccggatcaatcaatgcctggagcaccaaggagcccttttcttggatcaaggtggatctgttggcaccaatgattattcacggcatcaagacccagggtgcccgtcagaagttctccagcctctacatctctcagtttatcatcatgtatagtcttgatgggaagaagtggcagacttatcgaggaaattccactggaaccttaatggtcttctttggcaatgtggattcatctgggataaaacacaatatttttaaccctccaattattgctcgatacatccgtttgcacccaactcattatagcattcgcagcactcttcgcatggagttgatgggctgtgatttaaatagttgcagcatgccattgggaatggagagtaaagcaatatcagatgcacagattactgcttcatcctactttaccaatatgtttgccacctggtctccttcaaaagctcgacttcacctccaagggaggagtaatgcctggagacctcaggtgaataatccaaaagagtggctgcaagtggacttccagaagacaatgaaagtcacaggagtaactactcagggagtaaaatctctgcttaccagcatgtatgtgaaggagttcctcatctccagcagtcaagatggccatcagtggactctcttttttcagaatggcaaagtaaaggtttttcagggaaatcaagactccttcacacctgtggtgaactctctagacccaccgttactgactcgctaccttcgaattcacccccagagttgggtgcaccagattgccctgaggatggaggttctgggctgcgaggcacaggacctctac

SEQ ID NO: 13 - protein, 2351 aa, Artificial Sequence
  synthetic construct
MQIELSTCFFLCLLRFCFSATRRYYLGAVELSWDYMQSDLGELPVDARFPPRVPKSFPFNTSVVYKKTLFVEFTDHLFNIAKPRPPWMGLLGPTIQAEVYDTVVITLKNMASHPVSLHAVGVSYWKASEGAEYDDQTSQREKEDDKVFPGGSHTYVWQVLKENGPMASDPLCLTYSYLSHVDLVKDLNSGLIGALLVCREGSLAKEKTQTLHKFILLFAVFDEGKSWHSETKNSLMQDRDAASARAWPKMHTVNGYVNRSLPGLIGCHRKSVYWHVIGMGTTPEVHSIFLEGHTFLVRNHRQASLEISPITFLTAQTLLMDLGQFLLFCHISSHQHDGMEAYVKVDSCPEEPQLRMKNNEEAEDYDDDLTDSEMDVVRFDDDNSPSFIQIRSVAKKHPKTWVHYIAAEEEDWDYAPLVLAPDDRSYKSQYLNNGPQRIGRKYKKVRFMAYTDETFKTREAIQHESGILGPLLYGEVGDTLLIIFKNQASRPYNIYPHGITDVRPLYSRRLPKGVKHLKDFPILPGEIFKYKWTVTVEDGPTKSDPRCLTRYYSSFVNMERDLASGLIGPLLICYKESVDQRGNQIMSDKRNVILFSVFDENRSWYLTENIQRFLPNPAGVQLEDPEFQASNIMHSINGYVFDSLQLSVCLHEVAYWYILSIGAQTDFLSVFFSGYTFKHKMVYEDTLTLFPFSGETVFMSMENPGLWILGCHNSDFRNRGMTALLKVSSCDKNTGDYYEDSYEDISAYLLSKNNAIEPRSFSQNSRHPSTRQKQFNATTIPENDIEKTDPWFAHRTPMPKIQNVSSSDLLMLLRQSPTPHGLSLSDLQEAKYETFSDDPSPGAIDSNNSLSEMTHFRPQLHHSGDMVFTPESGLQLRLNEKLGTTAATELKKLDFKVSSTSNNLISTIPSDNLAAGTDNTSSLGPPSMPVHYDSQLDTTLFGKKSSPLTESGGPLSLSEENNDSKLLESGLMNSQESSWGKNVSSTESGRLFKGKRAHGPALLTKDNALFKVSISLLKTNKTSNNSATNRKTHIDGPSLLIENSPSVWQNILESDTEFKKVTPLIHDRMLMDKNATALRLNHMSNKTTSSKNMEMVQQKKEGPIPPDAQNPDMSFFKMLFLPESARWIQRTHGKNSLNSGQGPSPKQLVSLGPEKSVEGQNFLSEKNKVVVGKGEFTKDVGLKEMVFPSSRNLFLTNLDNLHENNTHNQEKKIQEEIEKKETLIQENVVLPQIHTVTGTKNFMKNLFLLSTRQNVEGSYDGAYAPVLQDFRSLNDSTNRTKKHTAHFSKKGEEENLEGLGNQTKQIVEKYACTTRISPNTSQQNFVTQRSKRALKQFRLPLEETELEKRIIVDDTSTQWSKNMKHLTPSTLTQIDYNEKEKGAITQSPLSDCLTRSHSIPQANRSPLPIAKVSSFPSIRPIYLTRVLFQDNSSHLPAASYRKKDSGVQESSHFLQGAKKNNLSLAILTLEMTGDQREVGSLGTSATNSVTYKKVENTVLPKPDLPKTSGKVELLPKVHIYQKDLFPTETSNGSPGHLDLVEGSLLQGTEGAIKWNEANRPGKVPFLRVATESSAKTPSKLLDPLAWDNHYGTQIPKEEWKSQEKSPEKTAFKKKDTILSLNACESNHAIAAINEGQNKPEIEVTWAKQGRTERLCSQNPPVLKRHQREITRTTLQSDQEEIDYDDTISVEMKKEDFDIYDEDENQSPRSFQKKTRHYFIAAVERLWDYGMSSSPHVLRNRAQSGSVPQFKKVVFQEFTDGSFTQPLYRGELNEHLGLLGPYIRAEVEDNIMVTFRNQASRPYSFYSSLISYEEDQRQGAEPRKNFVKPNETKTYFWKVQHHMAPTKDEFDCKAWAYFSDVDLEKDVHSGLIGPLLVCHTNTLNPAHGRQVTVQEFALFFTIFDETKSWYFTENMERNCRAPCNIQMEDPTFKENYRFHAINGYIMDTLPGLVMAQDQRIRWYLLSMGSNENIHSIHFSGHVFTVRKKEEYKMALYNLYPGVFETVEMLPSKAGIWRVECLIGEHLHAGMSTLFLVYSNKCQTPLGMASGHIRDFQITASGQYGQWAPKLARLHYSGSINAWSTKEPFSWIKVDLLAPMIIHGIKTQGARQKFSSLYISQFIIMYSLDGKKWQTYRGNSTGTLMVFFGNVDSSGIKHNIFNPPIIARYIRLHPTHYSIRSTLRMELMGCDLNSCSMPLGMESKAISDAQITASSYFTNMFATWSPSKARLHLQGRSNAWRPQVNNPKEWLQVDFQKTMKVTGVTTQGVKSLLTSMYVKEFLISSSQDGHQWTLFFQNGKVKVFQGNQDSFTPVVNSLDPPLLTRYLRIHPQSWVHQIALRMEVLGCEAQDLY

SEQ ID NO: 14 - protein, 2351 aa, Artificial Sequence [sequence omitted]

SEQ ID NO: 15 - protein, 2351 aa, Artificial Sequence
  synthetic construct
MQIELSTCFFLCLLRFCFSATRRYYLGAVELSWDYMQSDLGELPVDARFPPRVPKSFPFNTSVVYKKTLFVEFTDHLFNIAKPRPPWMGLLGPTIQAEVYDTVVITLKNMASHPVSLHAVGVSYWKASEGAEYDDQTSQREKEDDKVFPGGSHTYVWQVLKENGPMASDPLCLTYSYLSHVDLVKDLNSGLIGALLVCREGSLAKEKTQTLHKFILLFAVFDEGKSWHSETKNSLMQDRDAASARAWPKMHTVNGYVNRSLPGLIGCHRKSVYWHVIGMGTTPEVHSIFLEGHTFLVRNHRQASLEISPITFLTAQTLLMDLGQFLLFCHISSHQHDGMEAYVKVDSCPEEPQLRMKNNEEAEDYDDDLTDSEMDVVRFDDDNSPSFIQIRSVAKKHPKTWVHYIAAEEEDWDYAPLVLAPDDRSYKSQYLNNGPQRIGRKYKKVRFMAYTDETFKTREAIQHESGILGPLLYGEVGDTLLIIFKNQASRPYNIYPHGITDVRPLYSRRLPKGVKHLKDFPILPGEIFKYKWTVTVEDGPTKSDPRCLTRYYSSFVNMERDLASGLIGPLLICYKESVDQRGNQIMSDKRNVILFSVFDENRSWYLTENIQRFLPNPAGVQLEDPEFQASNIMHSINGYVFDSLQLSVCLHEVAYWYILSIGAQTDFLSVFFSGYTFKHKMVYEDTLTLFPFSGETVFMSMENPGLWILGCHNSDFRNRGMTALLKVSSCDKNTGDYYEDSYEDISAYLLSKNNAIEPRSFSQNSRHPSTRQKQFNATTIPENDIEKTDPWFAHRTPMPKIQNVSSSDLLMLLRQSPTPHGLSLSDLQEAKYETFSDDPSPGAIDSNNSLSEMTHFRPQLHHSGDMVFTPESGLQLRLNEKLGTTAATELKKLDFKVSSTSNNLISTIPSDNLAAGTDNTSSLGPPSMPVHYDSQLDTTLFGKKSSPLTESGGPLSLSEENNDSKLLESGLMNSQESSWGKNVSSTESGRLFKGKRAHGPALLTKDNALFKVSISLLKTNKTSNNSATNRKTHIDGPSLLIENSPSVWQNILESDTEFKKVTPLIHDRMLMDKNATALRLNHMSNKTTSSKNMEMVQQKKEGPIPPDAQNPDMSFFKMLFLPESARWIQRTHGKNSLNSGQGPSPKQLVSLGPEKSVEGQNFLSEKNKVVVGKGEFTKDVGLKEMVFPSSRNLFLTNLDNLHENNTHNQEKKIQEEIEKKETLIQENVVLPQIHTVTGTKNFMKNLFLLSTRQNVEGSYEGAYAPVLQDFRSLNDSTNRTKKHTAHFSKKGEEENLEGLGNQTKQIVEKYACTTRISPNTSQQNFVTQRSKRALKQFRLPLEETELEKRIIVDDTSTQWSKNMKHLTPSTLTQIDYNEKEKGAITQSPLSDCLTRSHSIPQANRSPLPIAKVSSFPSIRPIYLTRVLFQDNSSHLPAASYRKKDSGVQESSHFLQGAKKNNLSLAILTLEMTGDQREVGSLGTSATNSVTYKKVENTVLPKPDLPKTSGKVELLPKVHIYQKDLFPTETSNGSPGHLDLVEGSLLQGTEGAIKWNEANRPGKVPFLRVATESSAKTPSKLLDPLAWDNHYGTQIPKEEWKSQEKSPEKTAFKKKDTILSLNACESNHAIAAINEGQNKPEIEVTWAKQGRTERLCSQNPPVLKRHQREITRTTLQSDQEEIDYDDTISVEMKKEDFDIYDEDENQSPRSFQKKTRHYFIAAVERLWDYGMSSSPHVLRNRAQSGSVPQFKKVVFQEFTDGSFTQPLYRGELNEHLGLLGPYIRAEVEDNIMVTFRNQASRPYSFYSSLISYEEDQRQGAEPRKNFVKPNETKTYFWKVQHHMAPTKDEFDCKAWAYFSDVDLEKDVHSGLIGPLLVCHTNTLNPAHGRQVTVQEFALFFTIFDETKSWYFTENMERNCRAPCNIQMEDPTFKENYRFHAINGYIMDTLPGLVMAQDQRIRWYLLSMGSNENIHSIHFSGHVFTVRKKEEYKMALYNLYPGVFETVEMLPSKAGIWRVECLIGEHLHAGMSTLFLVYSNKCQTPLGMASGHIRDFQITASGQYGQWAPKLARLHYSGSINAWSTKEPFSWIKVDLLAPMIIHGIKTQGARQKFSSLYISQFIIMYSLDGKKWQTYRGNSTGTLMVFFGNVDSSGIKHNIFNPPIIARYIRLHPTHYSIRSTLRMELMGCDLNSCSMPLGMESKAISDAQITASSYFTNMFATWSPSKARLHLQGRSNAWRPQVNNPKEWLQVDFQKTVKVTGVTTQGVKSLLTSMYVKEFLISSSQDGHQWTLFFQNGKVKVFQGNQDSFTPVVNSLDPPLLTRYLRIHPQSWVHQIALRMEVLGCEAQDLY

SEQ ID NO: 16 - protein, 2351 aa, Artificial Sequence
  synthetic construct
MQIELSTCFFLCLLRFCFSATRRYYLGAVELSWDYMQSDLGELPVDARFPPRVPKSFPFNTSVVYKKTLFVEFTDHLFNIAKPRPPWMGLLGPTIQAEVYDTVVITLKNMASHPVSLHAVGVSYWKASEGAEYDDQTSQREKEDDKVFPGGSHTYVWQVLKENGPMASDPLCLTYSYLSHVDLVKDLNSGLIGALLVCREGSLAKEKTQTLHKFILLFAVFDEGKSWHSETKNSLMQDRDAASARAWPKMHTVNGYVNRSLPGLIGCHRKSVYWHVIGMGTTPEVHSIFLEGHTFLVRNHRQASLEISPITFLTAQTLLMDLGQFLLFCHISSHQHDGMEAYVKVDSCPEEPQLRMKNNEEAEDYDDDLTDSEMDVVRFDDDNSPSFIQIRSVAKKHPKTWVHYIAAEEEDWDYAPLVLAPDDRSYKSQYLNNGPQRIGRKYKKVRFMAYTDETFKTREAIQHESGILGPLLYGEVGDTLLIIFKNQASRPYNIYPHGITDVHPLYSRRLPKGVKHLKDFPILPGEIFKYKWTVTVEDGPTKSDPRCLTRYYSSFVNMERDLASGLIGPLLICYKESVDQRGNQIMSDKRNVILFSVFDENRSWYLTENIQRFLPNPAGVQLEDPEFQASNIMHSINGYVFDSLQLSVCLHEVAYWYILSIGAQTDFLSVFFSGYTFKHKMVYEDTLTLFPFSGETVFMSMENPGLWILGCHNSDFRNRGMTALLKVSSCDKNTGDYYEDSYEDISAYLLSKNNAIEPRSFSQNSRHPSTRQKQFNATTIPENDIEKTDPWFAHRTPMPKIQNVSSSDLLMLLRQSPTPHGLSLSDLQEAKYETFSDDPSPGAIDSNNSLSEMTHFRPQLHHSGDMVFTPESGLQLRLNEKLGTTAATELKKLDFKVSSTSNNLISTIPSDNLAAGTDNTSSLGPPSMPVHYDSQLDTTLFGKKSSPLTESGGPLSLSEENNDSKLLESGLMNSQESSWGKNVSSTESGRLFKGKRAHGPALLTKDNALFKVSISLLKTNKTSNNSATNRKTHIDGPSLLIENSPSVWQNILESDTEFKKVTPLIHDRMLMDKNATALRLNHMSNKTTSSKNMEMVQQKKEGPIPPDAQNPDMSFFKMLFLPESARWIQRTHGKNSLNSGQGPSPKQLVSLGPEKSVEGQNFLSEKNKVVVGKGEFTKDVGLKEMVFPSSRNLFLTNLDNLHENNTHNQEKKIQEEIEKKETLIQENVVLPQIHTVTGTKNFMKNLFLLSTRQNVEGSYEGAYAPVLQDFRSLNDSTNRTKKHTAHFSKKGEEENLEGLGNQTKQIVEKYACTTRISPNTSQQNFVTQRSKRALKQFRLPLEETELEKRIIVDDTSTQWSKNMKHLTPSTLTQIDYNEKEKGAITQSPLSDCLTRSHSIPQANRSPLPIAKVSSFPSIRPIYLTRVLFQDNSSHLPAASYRKKDSGVQESSHFLQGAKKNNLSLAILTLEMTGDQREVGSLGTSATNSVTYKKVENTVLPKPDLPKTSGKVELLPKVHIYQKDLFPTETSNGSPGHLDLVEGSLLQGTEGAIKWNEANRPGKVPFLRVATESSAKTPSKLLDPLAWDNHYGTQIPKEEWKSQEKSPEKTAFKKKDTILSLNACESNHAIAAINEGQNKPEIEVTWAKQGRTERLCSQNPPVLKRHQREITRTTLQSDQEEIDYDDTISVEMKKEDFDIYDEDENQSPRSFQKKTRHYFIAAVERLWDYGMSSSPHVLRNRAQSGSVPQFKKVVFQEFTDGSFTQPLYRGELNEHLGLLGPYIRAEVEDNIMVTFRNQASRPYSFYSSLISYEEDQRQGAEPRKNFVKPNETKTYFWKVQHHMAPTKDEFDCKAWAYFSDVDLEKDVHSGLIGPLLVCHTNTLNPAHGRQVTVQEFALFFTIFDETKSWYFTENMERNCRAPCNIQMEDPTFKENYRFHAINGYIMDTLPGLVMAQDQRIRWYLLSMGSNENIHSIHFSGHVFTVRKKEEYKMALYNLYPGVFETVEMLPSKAGIWRVECLIGEHLHAGMSTLFLVYSNKCQTPLGMASGHIRDFQITASGQYGQWAPKLARLHYSGSINAWSTKEPFSWIKVDLLAPMIIHGIKTQGARQKFSSLYISQFIIMYSLDGKKWQTYRGNSTGTLMVFFGNVDSSGIKHNIFNPPIIARYIRLHPTHYSIRSTLRMELMGCDLNSCSMPLGMESKAISDAQITASSYFTNMFATWSPSKARLHLQGRSNAWRPQVNNPKEWLQVDFQKTMKVTGVTTQGVKSLLTSMYVKEFLISSSQDGHQWTLFFQNGKVKVFQGNQDSFTPVVNSLDPPLLTRYLRIHPQSWVHQIALRMEVLGCEAQDLY

SEQ ID NO: 17 - protein, 2351 aa, Artificial Sequence
  synthetic construct
MQIELSTCFFLCLLRFCFSATRRYYLGAVELSWDYMQSDLGELPVDARFPPRVPKSFPFNTSVVYKKTLFVEFTDHLFNIAKPRPPWMGLLGPTIQAEVYDTVVITLKNMASHPVSLHAVGVSYWKASEGAEYDDQTSQREKEDDKVFPGGSHTYVWQVLKENGPMASDPLCLTYSYLSHVDLVKDLNSGLIGALLVCREGSLAKEKTQTLHKFILLFAVFDEGKSWHSETKNSLMQDRDAASARAWPKMHTVNGYVNRSLPGLIGCHRKSVYWHVIGMGTTPEVHSIFLEGHTFLVRNHRQASLEISPITFLTAQTLLMDLGQFLLFCHISSHQHDGMEAYVKVDSCPEEPQLRMKNNEEAEDYDDDLTDSEMDVVRFDDDNSPSFIQIRSVAKKHPKTWVHYIAAEEEDWDYAPLVLAPDDRSYKSQYLNNGPQRIGRKYKKVRFMAYTDETFKTREAIQHESGILGPLLYGEVGDTLLIIFKNQASRPYNIYPHGITDVRPLYSRRLPKGVKHLKDFPILPGEIFKYKWTVTVEDGPTKSDPRCLTRYYSSFVNMERDLASGLIGPLLICYKESVDQRGNQIMSDKRNVILFSVFDENRSWYLTENIQRFLPNPAGVQLEDPEFQASNIMHSINGYVFDSLQLSVCLHEVAYWYILSIGAQTDFLSVFFSGYTFKHKMVYEDTLTLFPFSGETVFMSMENPGLWILGCHNSDFRNRGMTALLKVSSCDKNTGDYYEDSYEDISAYLLSKNNAIEPRSFSQNSRHPSTRQKQFNATTIPENDIEKTDPWFAHRTPMPKIQNVSSSDLLMLLRQSPTPHGLSLSDLQEAKYETFSDDPSPGAIDSNNSLSEMTHFRPQLHHSGDMVFTPESGLQLRLNEKLGTTAATELKKLDFKVSSTSNNLISTIPSDNLAAGTDNTSSLGPPSMPVHYDSQLDTTLFGKKSSPLTESGGPLSLSEENNDSKLLESGLMNSQESSWGKNVSSTESGRLFKGKRAHGPALLTKDNALFKVSISLLKTNKTSNNSATNRKTHIDGPSLLIENSPSVWQNILESDTEFKKVTPLIHDRMLMDKNATALRLNHMSNKTTSSKNMEMVQQKKEGPIPPDAQNPDMSFFKMLFLPESARWIQRTHGKNSLNSGQGPSPKQLVSLGPEKSVEGQNFLSEKNKVVVGKGEFTKDVGLKEMVFPSSRNLFLTNLDNLHENNTHNQEKKIQEEIEKKETLIQENVVLPQIHTVTGTKNFMKNLFLLSTRQNVEGSYDGAYAPVLQDFRSLNDSTNRTKKHTAHFSKKGEEENLEGLGNQTKQIVEKYACTTRISPNTSQQNFVTQRSKRALKQFRLPLEETELEKRIIVDDTSTQWSKNMKHLTPSTLTQIDYNEKEKGAITQSPLSDCLTRSHSIPQANRSPLPIAKVSSFPSIRPIYLTRVLFQDNSSHLPAASYRKKDSGVQESSHFLQGAKKNNLSLAILTLEMTGDQREVGSLGTSATNSVTYKKVENTVLPKPDLPKTSGKVELLPKVHIYQKDLFPTETSNGSPGHLDLVEGSLLQGTEGAIKWNEANRPGKVPFLRVATESSAKTPSKLLDPLAWDNHYGTQIPKEEWKSQEKSPEKTAFKKKDTILSLNACESNHAIAAINEGQNKPEIEVTWAKQGRTERLCSQNPPVLKRHQREITRTTLQSDQEEIDYDDTISVEMKKEDFDIYDEDENQSPRSFQKKTRHYFIAAVERLWDYGMSSSPHVLRNRAQSGSVPQFKKVVFQEFTDGSFTQPLYRGELNEHLGLLGPYIRAEVEDNIMVTFRNQASRPYSFYSSLISYEEDQRQGAEPRKNFVKPNETKTYFWKVQHHMAPTKDEFDCKAWAYFSDVDLEKDVHSGLIGPLLVCHTNTLNPAHGRQVTVQEFALFFTIFDETKSWYFTENMERNCRAPCNIQMEDPTFKENYRFHAINGYIMDTLPGLVMAQDQRIRWYLLSMGSNENIHSIHFSGHVFTVRKKEEYKMALYNLYPGVFETVEMLPSKAGIWRVECLIGEHLHAGMSTLFLVYSNKCQTPLGMASGHIRDFQITASGQYGQWAPKLARLHYSGSINAWSTKEPFSWIKVDLLAPMIIHGIKTQGARQKFSSLYISQFIIMYSLDGKKWQTYRGNSTGTLMVFFGNVDSSGIKHNIFNPPIIARYIRLHPTHYSIRSTLRMELMGCDLNSCSMPLGMESKAISDAQITASSYFTNMFATWSPSKARLHLQGRSNAWRPQVNNPKEWLQVDFQKTVKVTGVTTQGVKSLLTSMYVKEFLISSSQDGHQWTLFFQNGKVKVFQGNQDSFTPVVNSLDPPLLTRYLRIHPQSWVHQIALRMEVLGCEAQDLY

SEQ ID NO: 18 - protein, 2351 aa, Artificial Sequence
  synthetic construct
MQIELSTCFFLCLLRFCFSATRRYYLGAVELSWDYMQSDLGELPVDARFPPRVPKSFPFNTSVVYKKTLFVEFTDHLFNIAKPRPPWMGLLGPTIQAEVYDTVVITLKNMASHPVSLHAVGVSYWKASEGAEYDDQTSQREKEDDKVFPGGSHTYVWQVLKENGPMASDPLCLTYSYLSHVDLVKDLNSGLIGALLVCREGSLAKEKTQTLHKFILLFAVFDEGKSWHSETKNSLMQDRDAASARAWPKMHTVNGYVNRSLPGLIGCHRKSVYWHVIGMGTTPEVHSIFLEGHTFLVRNHRQASLEISPITFLTAQTLLMDLGQFLLFCHISSHQHDGMEAYVKVDSCPEEPQLRMKNNEEAEDYDDDLTDSEMDVVRFDDDNSPSFIQIRSVAKKHPKTWVHYIAAEEEDWDYAPLVLAPDDRSYKSQYLNNGPQRIGRKYKKVRFMAYTDETFKTREAIQHESGILGPLLYGEVGDTLLIIFKNQASRPYNIYPHGITDVRPLYSRRLPKGVKHLKDFPILPGEIFKYKWTVTVEDGPTKSDPRCLTRYYSSFVNMERDLASGLIGPLLICYKESVDQRGNQIMSDKRNVILFSVFDENRSWYLTENIQRFLPNPAGVQLEDPEFQASNIMHSINGYVFDSLQLSVCLHEVAYWYILSIGAQTDFLSVFFSGYTFKHKMVYEDTLTLFPFSGETVFMSMENPGLWILGCHNSDFRNRGMTALLKVSSCDKNTGDYYEDSYEDISAYLLSKNNAIEPRSFSQNSRHPSTRQKQFNATTIPENDIEKTDPWFAHGTPMPKIQNVSSSDLLMLLRQSPTPHGLSLSDLQEAKYETFSDDPSPGAIDSNNSLSEMTHFRPQLHHSGDMVFTPESGLQLRLNEKLGTTAATELKKLDFKVSSTSNNLISTIPSDNLAAGTDNTSSLGPPSMPVHYDSQLDTTLFGKKSSPLTESGGPLSLSEENNDSKLLESGLMNSQESSWGKNVSSTESGRLFKGKRAHGPALLTKDNALFKVSISLLKTNKTSNNSATNRKTHIDGPSLLIENSPSVWQNILESDTEFKKVTPLIHDRMLMDKNATALRLNHMSNKTTSSKNMEMVQQKKEGPIPPDAQNPDMSFFKMLFLPESARWIQRTHGKNSLNSGQGPSPKQLVSLGPEKSVEGQNFLSEKNKVVVGKGEFTKDVGLKEMVFPSSRNLFLTNLDNLHENNTHNQEKKIQEEIEKKETLIQENVVLPQIHTVTGTKNFMKNLFLLSTRQNVEGSYEGAYAPVLQDFRSLNDSTNRTKKHTAHFSKKGEEENLEGLGNQTKQIVEKYACTTRISPNTSQQNFVTQRSKRALKQFRLPLEETELEKRIIVDDTSTQWSKNMKHLTPSTLTQIDYNEKEKGAITQSPLSDCLTRSHSIPQANRSPLPIAKVSSFPSIRPIYLTRVLFQDNSSHLPAASYRKKDSGVQESSHFLQGAKKNNLSLAILTLEMTGDQREVGSLGTSATNSVTYKKVENTVLPKPDLPKTSGKVELLPKVHIYQKDLFPTETSNGSPGHLDLVEGSLLQGTEGAIKWNEANRPGKVPFLRVATESSAKTPSKLLDPLAWDNHYGTQIPKEEWKSQEKSPEKTAFKKKDTILSLNACESNHAIAAINEGQNKPEIEVTWAKQGRTERLCSQNPPVLKRHQREITRTTLQSDQEEIDYDDTISVEMKKEDFDIYDEDENQSPRSFQKKTRHYFIAAVERLWDYGMSSSPHVLRNRAQSGSVPQFKKVVFQEFTDGSFTQPLYRGELNEHLGLLGPYIRAEVEDNIMVTFRNQASRPYSFYSSLISYEEDQRQGAEPRKNFVKPNETKTYFWKVQHHMAPTKDEFDCKAWAYFSDVDLEKDVHSGLIGPLLVCHTNTLNPAHGRQVTVQEFALFFTIFDETKSWYFTENMERNCRAPCNIQMEDPTFKENYRFHAINGYIMDTLPGLVMAQDQRIRWYLLSMGSNENIHSIHFSGHVFTVRKKEEYKMALYNLYPGVFETVEMLPSKAGIWRVECLIGEHLHAGMSTLFLVYSNKCQTPLGMASGHIRDFQITASGQYGQWAPKLARLHYSGSINAWSTKEPFSWIKVDLLAPMIIHGIKTQGARQKFSSLYISQFIIMYSLDGKKWQTYRGNSTGTLMVFFGNVDSSGIKHNIFNPPIIARYIRLHPTHYSIRSTLRMELMGCDLNSCSMPLGMESKAISDAQITASSYFTNMFATWSPSKARLHLQGRSNAWRPQVNNPKEWLQVDFQKTMKVTGVTTQGVKSLLTSMYVKEFLISSSQDGHQWTLFFQNGKVKVFQGNQDSFTPVVNSLDPPLLTRYLRIHPQSWVHQIALRMEVLGCEAQDLY

SEQ ID NO: 19 - protein, 2332 aa, Artificial Sequence
  synthetic construct
ATRRYYLGAVELSWDYMQSDLGELPVDARFPPRVPKSFPFNTSVVYKKTLFVEFTDHLFNIAKPRPPWMGLLGPTIQAEVYDTVVITLKNMASHPVSLHAVGVSYWKASEGAEYDDQTSQREKEDDKVFPGGSHTYVWQVLKENGPMASDPLCLTYSYLSHVDLVKDLNSGLIGALLVCREGSLAKEKTQTLHKFILLFAVFDEGKSWHSETKNSLMQDRDAASARAWPKMHTVNGYVNRSLPGLIGCHRKSVYWHVIGMGTTPEVHSIFLEGHTFLVRNHRQASLEISPITFLTAQTLLMDLGQFLLFCHISSHQHDGMEAYVKVDSCPEEPQLRMKNNEEAEDYDDDLTDSEMDVVRFDDDNSPSFIQIRSVAKKHPKTWVHYIAAEEEDWDYAPLVLAPDDRSYKSQYLNNGPQRIGRKYKKVRFMAYTDETFKTREAIQHESGILGPLLYGEVGDTLLIIFKNQASRPYNIYPHGITDVRPLYSRRLPKGVKHLKDFPILPGEIFKYKWTVTVEDGPTKSDPRCLTRYYSSFVNMERDLASGLIGPLLICYKESVDQRGNQIMSDKRNVILFSVFDENRSWYLTENIQRFLPNPAGVQLEDPEFQASNIMHSINGYVFDSLQLSVCLHEVAYWYILSIGAQTDFLSVFFSGYTFKHKMVYEDTLTLFPFSGETVFMSMENPGLWILGCHNSDFRNRGMTALLKVSSCDKNTGDYYEDSYEDISAYLLSKNNAIEPRSFSQNSRHPSTRQKQFNATTIPENDIEKTDPWFAHRTPMPKIQNVSSSDLLMLLRQSPTPHGLSLSDLQEAKYETFSDDPSPGAIDSNNSLSEMTHFRPQLHHSGDMVFTPESGLQLRLNEKLGTTAATELKKLDFKVSSTSNNLISTIPSDNLAAGTDNTSSLGPPSMPVHYDSQLDTTLFGKKSSPLTESGGPLSLSEENNDSKLLESGLMNSQESSWGKNVSSTESGRLFKGKRAHGPALLTKDNALFKVSISLLKTNKTSNNSATNRKTHIDGPSLLIENSPSVWQNILESDTEFKKVTPLIHDRMLMDKNATALRLNHMSNKTTSSKNMEMVQQKKEGPIPPDAQNPDMSFFKMLFLPESARWIQRTHGKNSLNSGQGPSPKQLVSLGPEKSVEGQNFLSEKNKVVVGKGEFTKDVGLKEMVFPSSRNLFLTNLDNLHENNTHNQEKKIQEEIEKKETLIQENVVLPQIHTVTGTKNFMKNLFLLSTRQNVEGSYDGAYAPVLQDFRSLNDSTNRTKKHTAHFSKKGEEENLEGLGNQTKQIVEKYACTTRISPNTSQQNFVTQRSKRALKQFRLPLEETELEKRIIVDDTSTQWSKNMKHLTPSTLTQIDYNEKEKGAITQSPLSDCLTRSHSIPQANRSPLPIAKVSSFPSIRPIYLTRVLFQDNSSHLPAASYRKKDSGVQESSHFLQGAKKNNLSLAILTLEMTGDQREVGSLGTSATNSVTYKKVENTVLPKPDLPKTSGKVELLPKVHIYQKDLFPTETSNGSPGHLDLVEGSLLQGTEGAIKWNEANRPGKVPFLRVATESSAKTPSKLLDPLAWDNHYGTQIPKEEWKSQEKSPEKTAFKKKDTILSLNACESNHAIAAINEGQNKPEIEVTWAKQGRTERLCSQNPPVLKRHQREITRTTLQSDQEEIDYDDTISVEMKKEDFDIYDEDENQSPRSFQKKTRHYFIAAVERLWDYGMSSSPHVLRNRAQSGSVPQFKKVVFQEFTDGSFTQPLYRGELNEHLGLLGPYIRAEVEDNIMVTFRNQASRPYSFYSSLISYEEDQRQGAEPRKNFVKPNETKTYFWKVQHHMAPTKDEFDCKAWAYFSDVDLEKDVHSGLIGPLLVCHTNTLNPAHGRQVTVQEFALFFTIFDETKSWYFTENMERNCRAPCNIQMEDPTFKENYRFHAINGYIMDTLPGLVMAQDQRIRWYLLSMGSNENIHSIHFSGHVFTVRKKEEYKMALYNLYPGVFETVEMLPSKAGIWRVECLIGEHLHAGMSTLFLVYSNKCQTPLGMASGHIRDFQITASGQYGQWAPKLARLHYSGSINAWSTKEPFSWIKVDLLAPMIIHGIKTQGARQKFSSLYISQFIIMYSLDGKKWQTYRGNSTGTLMVFFGNVDSSGIKHNIFNPPIIARYIRLHPTHYSIRSTLRMELMGCDLNSCSMPLGMESKAISDAQITASSYFTNMFATWSPSKARLHLQGRSNAWRPQVNNPKEWLQVDFQKTMKVTGVTTQGVKSLLTSMYVKEFLISSSQDGHQWTLFFQNGKVKVFQGNQDSFTPVVNSLDPPLLTRYLRIHPQSWVHQIALRMEVLGCEAQDLY

SEQ ID NO: 20 - protein, 2332 aa, Artificial Sequence
  synthetic construct
ATRRYYLGAVELSWDYMQSDLGELPVDARFPPRVPKSFPFNTSVVYKKTLFVEFTDHLFNIAKPRPPWMGLLGPTIQAEVYDTVVITLKNMASHPVSLHAVGVSYWKASEGAEYDDQTSQREKEDDKVFPGGSHTYVWQVLKENGPMASDPLCLTYSYLSHVDLVKDLNSGLIGALLVCREGSLAKEKTQTLHKFILLFAVFDEGKSWHSETKNSLMQDRDAASARAWPKMHTVNGYVNRSLPGLIGCHRKSVYWHVIGMGTTPEVHSIFLEGHTFLVRNHRQASLEISPITFLTAQTLLMDLGQFLLFCHISSHQHDGMEAYVKVDSCPEEPQLRMKNNEEAEDYDDDLTDSEMDVVRFDDDNSPSFIQIRSVAKKHPKTWVHYIAAEEEDWDYAPLVLAPDDRSYKSQYLNNGPQRIGRKYKKVRFMAYTDETFKTREAIQHESGILGPLLYGEVGDTLLIIFKNQASRPYNIYPHGITDVRPLYSRRLPKGVKHLKDFPILPGEIFKYKWTVTVEDGPTKSDPRCLTRYYSSFVNMERDLASGLIGPLLICYKESVDQRGNQIMSDKRNVILFSVFDENRSWYLTENIQRFLPNPAGVQLEDPEFQASNIMHSINGYVFDSLQLSVCLHEVAYWYILSIGAQTDFLSVFFSGYTFKHKMVYEDTLTLFPFSGETVFMSMENPGLWILGCHNSDFRNRGMTALLKVSSCDKNTGDYYEDSYEDISAYLLSKNNAIEPRSFSQNSRHPSTRQKQFNATTIPENDIEKTDPWFAHRTPMPKIQNVSSSDLLMLLRQSPTPHGLSLSDLQEAKYETFSDDPSPGAIDSNNSLSEMTHFRPQLHHSGDMVFTPESGLQLRLNEKLGTTAATELKKLDFKVSSTSNNLISTIPSDNLAAGTDNTSSLGPPSMPVHYDSQLDTTLFGKKSSPLTESGGPLSLSEENNDSKLLESGLMNSQESSWGKNVSSTESGRLFKGKRAHGPALLTKDNALFKVSISLLKTNKTSNNSATNRKTHIDGPSLLIENSPSVWQNILESDTEFKKVTPLIHDRMLMDKNATALRLNHMSNKTTSSKNMEMVQQKKEGPIPPDAQNPDMSFFKMLFLPESARWIQRTHGKNSLNSGQGPSPKQLVSLGPEKSVEGQNFLSEKNKVVVGKGEFTKDVGLKEMVFPSSRNLFLTNLDNLHENNTHNQEKKIQEEIEKKETLIQENVVLPQIHTVTGTKNFMKNLFLLSTRQNVEGSYEGAYAPVLQDFRSLNDSTNRTKKHTAHFSKKGEEENLEGLGNQTKQIVEKYACTTRISPNTSQQNFVTQRSKRALKQFRLPLEETELEKRIIVDDTSTQWSKNMKHLTPSTLTQIDYNEKEKGAITQSPLSDCLTRSHSIPQANRSPLPIAKVSSFPSIRPIYLTRVLFQDNSSHLPAASYRKKDSGVQESSHFLQGAKKNNLSLAILTLEMTGDQREVGSLGTSATNSVTYKKVENTVLPKPDLPKTSGKVELLPKVHIYQKDLFPTETSNGSPGHLDLVEGSLLQGTEGAIKWNEANRPGKVPFLRVATESSAKTPSKLLDPLAWDNHYGTQIPKEEWKSQEKSPEKTAFKKKDTILSLNACESNHAIAAINEGQNKPEIEVTWAKQGRTERLCSQNPPVLKRHQREITRTTLQSDQEEIDYDDTISVEMKKEDFDIYDEDENQSPRSFQKKTRHYFIAAVERLWDYGMSSSPHVLRNRAQSGSVPQFKKVVFQEFTDGSFTQPLYRGELNEHLGLLGPYIRAEVEDNIMVTFRNQASRPYSFYSSLISYEEDQRQGAEPRKNFVKPNETKTYFWKVQHHMAPTKDEFDCKAWAYFSDVDLEKDVHSGLIGPLLVCHTNTLNPAHGRQVTVQEFALFFTIFDETKSWYFTENMERNCRAPCNIQMEDPTFKENYRFHAINGYIMDTLPGLVMAQDQRIRWYLLSMGSNENIHSIHFSGHVFTVRKKEEYKMALYNLYPGVFETVEMLPSKAGIWRVECLIGEHLHAGMSTLFLVYSNKCQTPLGMASGHIRDFQITASGQYGQWAPKLARLHYSGSINAWSTKEPFSWIKVDLLAPMIIHGIKTQGARQKFSSLYISQFIIMYSLDGKKWQTYRGNSTGTLMVFFGNVDSSGIKHNIFNPPIIARYIRLHPTHYSIRSTLRMELMGCDLNSCSMPLGMESKAISDAQITASSYFTNMFATWSPSKARLHLQGRSNAWRPQVNNPKEWLQVDFQKTMKVTGVTTQGVKSLLTSMYVKEFLISSSQDGHQWTLFFQNGKVKVFQGNQDSFTPVVNSLDPPLLTRYLRIHPQSWVHQIALRMEVLGCEAQDLY

SEQ ID NO: 21 - protein, 2332 aa, Artificial Sequence
  synthetic construct
ATRRYYLGAVELSWDYMQSDLGELPVDARFPPRVPKSFPFNTSVVYKKTLFVEFTDHLFNIAKPRPPWMGLLGPTIQAEVYDTVVITLKNMASHPVSLHAVGVSYWKASEGAEYDDQTSQREKEDDKVFPGGSHTYVWQVLKENGPMASDPLCLTYSYLSHVDLVKDLNSGLIGALLVCREGSLAKEKTQTLHKFILLFAVFDEGKSWHSETKNSLMQDRDAASARAWPKMHTVNGYVNRSLPGLIGCHRKSVYWHVIGMGTTPEVHSIFLEGHTFLVRNHRQASLEISPITFLTAQTLLMDLGQFLLFCHISSHQHDGMEAYVKVDSCPEEPQLRMKNNEEAEDYDDDLTDSEMDVVRFDDDNSPSFIQIRSVAKKHPKTWVHYIAAEEEDWDYAPLVLAPDDRSYKSQYLNNGPQRIGRKYKKVRFMAYTDETFKTREAIQHESGILGPLLYGEVGDTLLIIFKNQASRPYNIYPHGITDVRPLYSRRLPKGVKHLKDFPILPGEIFKYKWTVTVEDGPTKSDPRCLTRYYSSFVNMERDLASGLIGPLLICYKESVDQRGNQIMSDKRNVILFSVFDENRSWYLTENIQRFLPNPAGVQLEDPEFQASNIMHSINGYVFDSLQLSVCLHEVAYWYILSIGAQTDFLSVFFSGYTFKHKMVYEDTLTLFPFSGETVFMSMENPGLWILGCHNSDFRNRGMTALLKVSSCDKNTGDYYEDSYEDISAYLLSKNNAIEPRSFSQNSRHPSTRQKQFNATTIPENDIEKTDPWFAHRTPMPKIQNVSSSDLLMLLRQSPTPHGLSLSDLQEAKYETFSDDPSPGAIDSNNSLSEMTHFRPQLHHSGDMVFTPESGLQLRLNEKLGTTAATELKKLDFKVSSTSNNLISTIPSDNLAAGTDNTSSLGPPSMPVHYDSQLDTTLFGKKSSPLTESGGPLSLSEENNDSKLLESGLMNSQESSWGKNVSSTESGRLFKGKRAHGPALLTKDNALFKVSISLLKTNKTSNNSATNRKTHIDGPSLLIENSPSVWQNILESDTEFKKVTPLIHDRMLMDKNATALRLNHMSNKTTSSKNMEMVQQKKEGPIPPDAQNPDMSFFKMLFLPESARWIQRTHGKNSLNSGQGPSPKQLVSLGPEKSVEGQNFLSEKNKVVVGKGEFTKDVGLKEMVFPSSRNLFLTNLDNLHENNTHNQEKKIQEEIEKKETLIQENVVLPQIHTVTGTKNFMKNLFLLSTRQNVEGSYEGAYAPVLQDFRSLNDSTNRTKKHTAHFSKKGEEENLEGLGNQTKQIVEKYACTTRISPNTSQQNFVTQRSKRALKQFRLPLEETELEKRIIVDDTSTQWSKNMKHLTPSTLTQIDYNEKEKGAITQSPLSDCLTRSHSIPQANRSPLPIAKVSSFPSIRPIYLTRVLFQDNSSHLPAASYRKKDSGVQESSHFLQGAKKNNLSLAILTLEMTGDQREVGSLGTSATNSVTYKKVENTVLPKPDLPKTSGKVELLPKVHIYQKDLFPTETSNGSPGHLDLVEGSLLQGTEGAIKWNEANRPGKVPFLRVATESSAKTPSKLLDPLAWDNHYGTQIPKEEWKSQEKSPEKTAFKKKDTILSLNACESNHAIAAINEGQNKPEIEVTWAKQGRTERLCSQNPPVLKRHQREITRTTLQSDQEEIDYDDTISVEMKKEDFDIYDEDENQSPRSFQKKTRHYFIAAVERLWDYGMSSSPHVLRNRAQSGSVPQFKKVVFQEFTDGSFTQPLYRGELNEHLGLLGPYIRAEVEDNIMVTFRNQASRPYSFYSSLISYEEDQRQGAEPRKNFVKPNETKTYFWKVQHHMAPTKDEFDCKAWAYFSDVDLEKDVHSGLIGPLLVCHTNTLNPAHGRQVTVQEFALFFTIFDETKSWYFTENMERNCRAPCNIQMEDPTFKENYRFHAINGYIMDTLPGLVMAQDQRIRWYLLSMGSNENIHSIHFSGHVFTVRKKEEYKMALYNLYPGVFETVEMLPSKAGIWRVECLIGEHLHAGMSTLFLVYSNKCQTPLGMASGHIRDFQITASGQYGQWAPKLARLHYSGSINAWSTKEPFSWIKVDLLAPMIIHGIKTQGARQKFSSLYISQFIIMYSLDGKKWQTYRGNSTGTLMVFFGNVDSSGIKHNIFNPPIIARYIRLHPTHYSIRSTLRMELMGCDLNSCSMPLGMESKAISDAQITASSYFTNMFATWSPSKARLHLQGRSNAWRPQVNNPKEWLQVDFQKTVKVTGVTTQGVKSLLTSMYVKEFLISSSQDGHQWTLFFQNGKVKVFQGNQDSFTPVVNSLDPPLLTRYLRIHPQSWVHQIALRMEVLGCEAQDLY

SEQ ID NO: 22 - protein, 2332 aa, Artificial Sequence
  synthetic construct
ATRRYYLGAVELSWDYMQSDLGELPVDARFPPRVPKSFPFNTSVVYKKTLFVEFTDHLFNIAKPRPPWMGLLGPTIQAEVYDTVVITLKNMASHPVSLHAVGVSYWKASEGAEYDDQTSQREKEDDKVFPGGSHTYVWQVLKENGPMASDPLCLTYSYLSHVDLVKDLNSGLIGALLVCREGSLAKEKTQTLHKFILLFAVFDEGKSWHSETKNSLMQDRDAASARAWPKMHTVNGYVNRSLPGLIGCHRKSVYWHVIGMGTTPEVHSIFLEGHTFLVRNHRQASLEISPITFLTAQTLLMDLGQFLLFCHISSHQHDGMEAYVKVDSCPEEPQLRMKNNEEAEDYDDDLTDSEMDVVRFDDDNSPSFIQIRSVAKKHPKTWVHYIAAEEEDWDYAPLVLAPDDRSYKSQYLNNGPQRIGRKYKKVRFMAYTDETFKTREAIQHESGILGPLLYGEVGDTLLIIFKNQASRPYNIYPHGITDVHPLYSRRLPKGVKHLKDFPILPGEIFKYKWTVTVEDGPTKSDPRCLTRYYSSFVNMERDLASGLIGPLLICYKESVDQRGNQIMSDKRNVILFSVFDENRSWYLTENIQRFLPNPAGVQLEDPEFQASNIMHSINGYVFDSLQLSVCLHEVAYWYILSIGAQTDFLSVFFSGYTFKHKMVYEDTLTLFPFSGETVFMSMENPGLWILGCHNSDFRNRGMTALLKVSSCDKNTGDYYEDSYEDISAYLLSKNNAIEPRSFSQNSRHPSTRQKQFNATTIPENDIEKTDPWFAHRTPMPKIQNVSSSDLLMLLRQSPTPHGLSLSDLQEAKYETFSDDPSPGAIDSNNSLSEMTHFRPQLHHSGDMVFTPESGLQLRLNEKLGTTAATELKKLDFKVSSTSNNLISTIPSDNLAAGTDNTSSLGPPSMPVHYDSQLDTTLFGKKSSPLTESGGPLSLSEENNDSKLLESGLMNSQESSWGKNVSSTESGRLFKGKRAHGPALLTKDNALFKVSISLLKTNKTSNNSATNRKTHIDGPSLLIENSPSVWQNILESDTEFKKVTPLIHDRMLMDKNATALRLNHMSNKTTSSKNMEMVQQKKEGPIPPDAQNPDMSFFKMLFLPESARWIQRTHGKNSLNSGQGPSPKQLVSLGPEKSVEGQNFLSEKNKVVVGKGEFTKDVGLKEMVFPSSRNLFLTNLDNLHENNTHNQEKKIQEEIEKKETLIQENVVLPQIHTVTGTKNFMKNLFLLSTRQNVEGSYEGAYAPVLQDFRSLNDSTNRTKKHTAHFSKKGEEENLEGLGNQTKQIVEKYACTTRISPNTSQQNFVTQRSKRALKQFRLPLEETELEKRIIVDDTSTQWSKNMKHLTPSTLTQIDYNEKEKGAITQSPLSDCLTRSHSIPQANRSPLPIAKVSSFPSIRPIYLTRVLFQDNSSHLPAASYRKKDSGVQESSHFLQGAKKNNLSLAILTLEMTGDQREVGSLGTSATNSVTYKKVENTVLPKPDLPKTSGKVELLPKVHIYQKDLFPTETSNGSPGHLDLVEGSLLQGTEGAIKWNEANRPGKVPFLRVATESSAKTPSKLLDPLAWDNHYGTQIPKEEWKSQEKSPEKTAFKKKDTILSLNACESNHAIAAINEGQNKPEIEVTWAKQGRTERLCSQNPPVLKRHQREITRTTLQSDQEEIDYDDTISVEMKKEDFDIYDEDENQSPRSFQKKTRHYFIAAVERLWDYGMSSSPHVLRNRAQSGSVPQFKKVVFQEFTDGSFTQPLYRGELNEHLGLLGPYIRAEVEDNIMVTFRNQASRPYSFYSSLISYEEDQRQGAEPRKNFVKPNETKTYFWKVQHHMAPTKDEFDCKAWAYFSDVDLEKDVHSGLIGPLLVCHTNTLNPAHGRQVTVQEFALFFTIFDETKSWYFTENMERNCRAPCNIQMEDPTFKENYRFHAINGYIMDTLPGLVMAQDQRIRWYLLSMGSNENIHSIHFSGHVFTVRKKEEYKMALYNLYPGVFETVEMLPSKAGIWRVECLIGEHLHAGMSTLFLVYSNKCQTPLGMASGHIRDFQITASGQYGQWAPKLARLHYSGSINAWSTKEPFSWIKVDLLAPMIIHGIKTQGARQKFSSLYISQFIIMYSLDGKKWQTYRGNSTGTLMVFFGNVDSSGIKHNIFNPPIIARYIRLHPTHYSIRSTLRMELMGCDLNSCSMPLGMESKAISDAQITASSYFTNMFATWSPSKARLHLQGRSNAWRPQVNNPKEWLQVDFQKTMKVTGVTTQGVKSLLTSMYVKEFLISSSQDGHQWTLFFQNGKVKVFQGNQDSFTPVVNSLDPPLLTRYLRIHPQSWVHQIALRMEVLGCEAQDLY

SEQ ID NO: 23 - protein, 2332 aa, Artificial Sequence
  synthetic construct
ATRRYYLGAVELSWDYMQSDLGELPVDARFPPRVPKSFPFNTSVVYKKTLFVEFTDHLFNIAKPRPPWMGLLGPTIQAEVYDTVVITLKNMASHPVSLHAVGVSYWKASEGAEYDDQTSQREKEDDKVFPGGSHTYVWQVLKENGPMASDPLCLTYSYLSHVDLVKDLNSGLIGALLVCREGSLAKEKTQTLHKFILLFAVFDEGKSWHSETKNSLMQDRDAASARAWPKMHTVNGYVNRSLPGLIGCHRKSVYWHVIGMGTTPEVHSIFLEGHTFLVRNHRQASLEISPITFLTAQTLLMDLGQFLLFCHISSHQHDGMEAYVKVDSCPEEPQLRMKNNEEAEDYDDDLTDSEMDVVRFDDDNSPSFIQIRSVAKKHPKTWVHYIAAEEEDWDYAPLVLAPDDRSYKSQYLNNGPQRIGRKYKKVRFMAYTDETFKTREAIQHESGILGPLLYGEVGDTLLIIFKNQASRPYNIYPHGITDVRPLYSRRLPKGVKHLKDFPILPGEIFKYKWTVTVEDGPTKSDPRCLTRYYSSFVNMERDLASGLIGPLLICYKESVDQRGNQIMSDKRNVILFSVFDENRSWYLTENIQRFLPNPAGVQLEDPEFQASNIMHSINGYVFDSLQLSVCLHEVAYWYILSIGAQTDFLSVFFSGYTFKHKMVYEDTLTLFPFSGETVFMSMENPGLWILGCHNSDFRNRGMTALLKVSSCDKNTGDYYEDSYEDISAYLLSKNNAIEPRSFSQNSRHPSTRQKQFNATTIPENDIEKTDPWFAHRTPMPKIQNVSSSDLLMLLRQSPTPHGLSLSDLQEAKYETFSDDPSPGAIDSNNSLSEMTHFRPQLHHSGDMVFTPESGLQLRLNEKLGTTAATELKKLDFKVSSTSNNLISTIPSDNLAAGTDNTSSLGPPSMPVHYDSQLDTTLFGKKSSPLTESGGPLSLSEENNDSKLLESGLMNSQESSWGKNVSSTESGRLFKGKRAHGPALLTKDNALFKVSISLLKTNKTSNNSATNRKTHIDGPSLLIENSPSVWQNILESDTEFKKVTPLIHDRMLMDKNATALRLNHMSNKTTSSKNMEMVQQKKEGPIPPDAQNPDMSFFKMLFLPESARWIQRTHGKNSLNSGQGPSPKQLVSLGPEKSVEGQNFLSEKNKVVVGKGEFTKDVGLKEMVFPSSRNLFLTNLDNLHENNTHNQEKKIQEEIEKKETLIQENVVLPQIHTVTGTKNFMKNLFLLSTRQNVEGSYDGAYAPVLQDFRSLNDSTNRTKKHTAHFSKKGEEENLEGLGNQTKQIVEKYACTTRISPNTSQQNFVTQRSKRALKQFRLPLEETELEKRIIVDDTSTQWSKNMKHLTPSTLTQIDYNEKEKGAITQSPLSDCLTRSHSIPQANRSPLPIAKVSSFPSIRPIYLTRVLFQDNSSHLPAASYRKKDSGVQESSHFLQGAKKNNLSLAILTLEMTGDQREVGSLGTSATNSVTYKKVENTVLPKPDLPKTSGKVELLPKVHIYQKDLFPTETSNGSPGHLDLVEGSLLQGTEGAIKWNEANRPGKVPFLRVATESSAKTPSKLLDPLAWDNHYGTQIPKEEWKSQEKSPEKTAFKKKDTILSLNACESNHAIAAINEGQNKPEIEVTWAKQGRTERLCSQNPPVLKRHQREITRTTLQSDQEEIDYDDTISVEMKKEDFDIYDEDENQSPRSFQKKTRHYFIAAVERLWDYGMSSSPHVLRNRAQSGSVPQFKKVVFQEFTDGSFTQPLYRGELNEHLGLLGPYIRAEVEDNIMVTFRNQASRPYSFYSSLISYEEDQRQGAEPRKNFVKPNETKTYFWKVQHHMAPTKDEFDCKAWAYFSDVDLEKDVHSGLIGPLLVCHTNTLNPAHGRQVTVQEFALFFTIFDETKSWYFTENMERNCRAPCNIQMEDPTFKENYRFHAINGYIMDTLPGLVMAQDQRIRWYLLSMGSNENIHSIHFSGHVFTVRKKEEYKMALYNLYPGVFETVEMLPSKAGIWRVECLIGEHLHAGMSTLFLVYSNKCQTPLGMASGHIRDFQITASGQYGQWAPKLARLHYSGSINAWSTKEPFSWIKVDLLAPMIIHGIKTQGARQKFSSLYISQFIIMYSLDGKKWQTYRGNSTGTLMVFFGNVDSSGIKHNIFNPPIIARYIRLHPTHYSIRSTLRMELMGCDLNSCSMPLGMESKAISDAQITASSYFTNMFATWSPSKARLHLQGRSNAWRPQVNNPKEWLQVDFQKTVKVTGVTTQGVKSLLTSMYVKEFLISSSQDGHQWTLFFQNGKVKVFQGNQDSFTPVVNSLDPPLLTRYLRIHPQSWVHQIALRMEVLGCEAQDLY

SEQ ID NO: 24 - protein, 2332 aa, Artificial Sequence
  synthetic construct
ATRRYYLGAVELSWDYMQSDLGELPVDARFPPRVPKSFPFNTSVVYKKTLFVEFTDHLFNIAKPRPPWMGLLGPTIQAEVYDTVVITLKNMASHPVSLHAVGVSYWKASEGAEYDDQTSQREKEDDKVFPGGSHTYVWQVLKENGPMASDPLCLTYSYLSHVDLVKDLNSGLIGALLVCREGSLAKEKTQTLHKFILLFAVFDEGKSWHSETKNSLMQDRDAASARAWPKMHTVNGYVNRSLPGLIGCHRKSVYWHVIGMGTTPEVHSIFLEGHTFLVRNHRQASLEISPITFLTAQTLLMDLGQFLLFCHISSHQHDGMEAYVKVDSCPEEPQLRMKNNEEAEDYDDDLTDSEMDVVRFDDDNSPSFIQIRSVAKKHPKTWVHYIAAEEEDWDYAPLVLAPDDRSYKSQYLNNGPQRIGRKYKKVRFMAYTDETFKTREAIQHESGILGPLLYGEVGDTLLIIFKNQASRPYNIYPHGITDVRPLYSRRLPKGVKHLKDFPILPGEIFKYKWTVTVEDGPTKSDPRCLTRYYSSFVNMERDLASGLIGPLLICYKESVDQRGNQIMSDKRNVILFSVFDENRSWYLTENIQRFLPNPAGVQLEDPEFQASNIMHSINGYVFDSLQLSVCLHEVAYWYILSIGAQTDFLSVFFSGYTFKHKMVYEDTLTLFPFSGETVFMSMENPGLWILGCHNSDFRNRGMTALLKVSSCDKNTGDYYEDSYEDISAYLLSKNNAIEPRSFSQNSRHPSTRQKQFNATTIPENDIEKTDPWFAHGTPMPKIQNVSSSDLLMLLRQSPTPHGLSLSDLQEAKYETFSDDPSPGAIDSNNSLSEMTHFRPQLHHSGDMVFTPESGLQLRLNEKLGTTAATELKKLDFKVSSTSNNLISTIPSDNLAAGTDNTSSLGPPSMPVHYDSQLDTTLFGKKSSPLTESGGPLSLSEENNDSKLLESGLMNSQESSWGKNVSSTESGRLFKGKRAHGPALLTKDNALFKVSISLLKTNKTSNNSATNRKTHIDGPSLLIENSPSVWQNILESDTEFKKVTPLIHDRMLMDKNATALRLNHMSNKTTSSKNMEMVQQKKEGPIPPDAQNPDMSFFKMLFLPESARWIQRTHGKNSLNSGQGPSPKQLVSLGPEKSVEGQNFLSEKNKVVVGKGEFTKDVGLKEMVFPSSRNLFLTNLDNLHENNTHNQEKKIQEEIEKKETLIQENVVLPQIHTVTGTKNFMKNLFLLSTRQNVEGSYEGAYAPVLQDFRSLNDSTNRTKKHTAHFSKKGEEENLEGLGNQTKQIVEKYACTTRISPNTSQQNFVTQRSKRALKQFRLPLEETELEKRIIVDDTSTQWSKNMKHLTPSTLTQIDYNEKEKGAITQSPLSDCLTRSHSIPQANRSPLPIAKVSSFPSIRPIYLTRVLFQDNSSHLPAASYRKKDSGVQESSHFLQGAKKNNLSLAILTLEMTGDQREVGSLGTSATNSVTYKKVENTVLPKPDLPKTSGKVELLPKVHIYQKDLFPTETSNGSPGHLDLVEGSLLQGTEGAIKWNEANRPGKVPFLRVATESSAKTPSKLLDPLAWDNHYGTQIPKEEWKSQEKSPEKTAFKKKDTILSLNACESNHAIAAINEGQNKPEIEVTWAKQGRTERLCSQNPPVLKRHQREITRTTLQSDQEEIDYDDTISVEMKKEDFDIYDEDENQSPRSFQKKTRHYFIAAVERLWDYGMSSSPHVLRNRAQSGSVPQFKKVVFQEFTDGSFTQPLYRGELNEHLGLLGPYIRAEVEDNIMVTFRNQASRPYSFYSSLISYEEDQRQGAEPRKNFVKPNETKTYFWKVQHHMAPTKDEFDCKAWAYFSDVDLEKDVHSGLIGPLLVCHTNTLNPAHGRQVTVQEFALFFTIFDETKSWYFTENMERNCRAPCNIQMEDPTFKENYRFHAINGYIMDTLPGLVMAQDQRIRWYLLSMGSNENIHSIHFSGHVFTVRKKEEYKMALYNLYPGVFETVEMLPSKAGIWRVECLIGEHLHAGMSTLFLVYSNKCQTPLGMASGHIRDFQITASGQYGQWAPKLARLHYSGSINAWSTKEPFSWIKVDLLAPMIIHGIKTQGARQKFSSLYISQFIIMYSLDGKKWQTYRGNSTGTLMVFFGNVDSSGIKHNIFNPPIIARYIRLHPTHYSIRSTLRMELMGCDLNSCSMPLGMESKAISDAQITASSYFTNMFATWSPSKARLHLQGRSNAWRPQVNNPKEWLQVDFQKTMKVTGVTTQGVKSLLTSMYVKEFLISSSQDGHQWTLFFQNGKVKVFQGNQDSFTPVVNSLDPPLLTRYLRIHPQSWVHQIALRMEVLGCEAQDLY

SEQ ID NO: 25 - DNA, 19 bp, Artificial Sequence
  synthetic construct
aatcaagcaagcagaccat

SEQ ID NO: 26 - DNA, 17 bp, Artificial Sequence
  synthetic construct
ggccaacagctggagaa

SEQ ID NO: 27 - DNA, 27 bp, Artificial Sequence
  synthetic construct
tacaaaggacggacatcagtgattccg

SEQ ID NO: 28 - DNA, 35 bp, Artificial Sequence
  synthetic construct
atcgagggaatatttaccttttggtaatctccttg

SEQ ID NO: 29 - DNA, 21 bp, Artificial Sequence
  synthetic construct
cagaattcaagacaccctagc

SEQ ID NO: 30 - DNA, 18 bp, Artificial Sequence
  synthetic construct
ctctgtcgcaagagcatc

SEQ ID NO: 31 - DNA, 35 bp, Artificial Sequence
  synthetic construct
agtcttctctatgtcattttctggaattgtggtgg

SEQ ID NO: 32 - DNA, 20 bp, Artificial Sequence
  synthetic construct
ttccgtgtgcaaaccaaggg

SEQ ID NO: 33 - DNA, 21 bp, Artificial Sequence
  synthetic construct
gcctcagatacatacagtgac

SEQ ID NO: 34 - DNA, 29 bp, Artificial Sequence
  synthetic construct
tgttctatttgttgaatcatttaatgacc

SEQ ID NO: 35 - DNA, 35 bp, Artificial Sequence
  synthetic construct
cttttcttactgagcactaggcaaaatgtagaagg

SEQ ID NO: 36 - DNA, 23 bp, Artificial Sequence
  synthetic construct
catatgacggggcatatgctcca

SEQ ID NO: 37 - DNA, 17 bp, Artificial Sequence
  synthetic construct
aatggtgaccaagaggc

SEQ ID NO: 38 - DNA, 22 bp, Artificial Sequence
  synthetic construct
gatgaggaactccttcacatac

SEQ ID NO: 39 - DNA, 35 bp, Artificial Sequence
  synthetic construct
ccactcttttggattattcacctgagggcaataga

SEQ ID NO: 40 - DNA, 28 bp, Artificial Sequence
  synthetic construct
tttcactgtcttctggaagtccacttgc

SEQ ID NO: 41 - DNA, 20 bp, Artificial Sequence
  synthetic construct
ctcacggaatcactgatgtc

SEQ ID NO: 42 - DNA, 22 bp, Artificial Sequence
  synthetic construct
gtaatctccttgaatacaaagg

SEQ ID NO: 43 - DNA, 19 bp, Artificial Sequence
  synthetic construct
tgacccttggtttgcacac

SEQ ID NO: 44 - DNA, 22 bp, Artificial Sequence
  synthetic construct
tgtattttaggcataggtgttc

SEQ ID NO: 45 - DNA, 23 bp, Artificial Sequence
  synthetic construct
caaaatgtagaaggttcatatga

SEQ ID NO: 46 - DNA, 21 bp, Artificial Sequence
  synthetic construct
ttgaagtactggagcatatgc

SEQ ID NO: 47 - DNA, 20 bp, Artificial Sequence
  synthetic construct
aagtggacttccagaagaca

SEQ ID NO: 48 - DNA, 21 bp, Artificial Sequence
  synthetic construct
tagttactcctgtgactttca

SEQ ID NO: 49 - DNA, 20 bp, Artificial Sequence
  synthetic construct
ttatcaaaggggcttcttgc

SEQ ID NO: 50 - DNA, 19 bp, Artificial Sequence
  synthetic construct
catgccctttctcctgacc

SEQ ID NO: 51 - DNA, 20 bp, Artificial Sequence
  synthetic construct
agcaagtgttgaggtccagg

SEQ ID NO: 52 - DNA, 20 bp, Artificial Sequence
  synthetic construct
tgaagtagcaaaagggaggc

SEQ ID NO: 53 - DNA, 20 bp, Artificial Sequence
  synthetic construct
cttctccatccctctcctcc

SEQ ID NO: 54 - DNA, 20 bp, Artificial Sequence
  synthetic construct
cagaaatgtttctttggggc

SEQ ID NO: 55 - DNA, 20 bp, Artificial Sequence
  synthetic construct
cttcaaatttgcctccttgc

SEQ ID NO: 56 - DNA, 20 bp, Artificial Sequence
  synthetic construct
agaccaagcagaggaagacg

SEQ ID NO: 57 - DNA, 20 bp, Artificial Sequence
  synthetic construct
aatcttgcctcagagcaacc

SEQ ID NO: 58 - DNA, 20 bp, Artificial Sequence
  synthetic construct
gaaaagcaattcctaggggg

SEQ ID NO: 59 - DNA, 20 bp, Artificial Sequence
  synthetic construct
gggcaacagagtgagactcc

SEQ ID NO: 60 - DNA, 20 bp, Artificial Sequence
  synthetic construct
ttctggaactcagctcctcc

SEQ ID NO: 61 - DNA, 20 bp, Artificial Sequence
  synthetic construct
ggagacctgacatcaaagcc

SEQ ID NO: 62 - DNA, 20 bp, Artificial Sequence
  synthetic construct
aaccccatctccttcattcc

SEQ ID NO: 63 - DNA, 20 bp, Artificial Sequence
  synthetic construct
taaggtgtgagcacactggg

SEQ ID NO: 64 - DNA, 21 bp, Artificial Sequence
  synthetic construct
cgatgagttctgttctgagcc

SEQ ID NO: 65 - DNA, 20 bp, Artificial Sequence
  synthetic construct
atggtgattggtgaccttgg

SEQ ID NO: 66 - DNA, 20 bp, Artificial Sequence
  synthetic construct
ggaaactaggggatcttggc

SEQ ID NO: 67 - DNA, 20 bp, Artificial Sequence
  synthetic construct
gtcttgctcctgctttcacc

SEQ ID NO: 68 - DNA, 20 bp, Artificial Sequence
  synthetic construct
tacccttgccatttgattcc

SEQ ID NO: 69 - DNA, 20 bp, Artificial Sequence
  synthetic construct
ctgctgaagaggaggactgg

SEQ ID NO: 70 - DNA, 20 bp, Artificial Sequence
  synthetic construct
atgtccattggagacaaggc

SEQ ID NO: 71 - DNA, 20 bp, Artificial Sequence
  synthetic construct
gattgtggtatctgcagggg

SEQ ID NO: 72 - DNA, 20 bp, Artificial Sequence
  synthetic construct
caacagctggagaaaggacc

SEQ ID NO: 73 - DNA, 21 bp, Artificial Sequence
  synthetic construct
tgacactttcacagtcaaccg

SEQ ID NO: 74 - DNA, 20 bp, Artificial Sequence
  synthetic construct
cagcaggcacgtttactacg

SEQ ID NO: 75 - DNA, 20 bp, Artificial Sequence
  synthetic construct
cagtcaccctcttgtcctgg

SEQ ID NO: 76 - DNA, 20 bp, Artificial Sequence
  synthetic construct
gggaattaaaagggagaggg

SEQ ID NO: 77 - DNA, 21 bp, Artificial Sequence
  synthetic construct
cctgggaataagataatgggc

SEQ ID NO: 78 - DNA, 20 bp, Artificial Sequence
  synthetic construct
aaatgctggtgaggatgtgg

SEQ ID NO: 79 - DNA, 20 bp, Artificial Sequence
  synthetic construct
acagcagcaatgcaaaaacc

SEQ ID NO: 80 - DNA, 20 bp, Artificial Sequence
  synthetic construct
tctattgctccaggtgatgg

SEQ ID NO: 81 - DNA, 20 bp, Artificial Sequence
  synthetic construct
atgctcttgcgacagagtcc

SEQ ID NO: 82 - DNA, 20 bp, Artificial Sequence
  synthetic construct
aacaaagcaggtccatgagc

SEQ ID NO: 83 - DNA, 20 bp, Artificial Sequence
  synthetic construct
ttggcaaaaagtcatctccc

SEQ ID NO: 84 - DNA, 19 bp, Artificial Sequence
  synthetic construct
taattgctttggactgggg

SEQ ID NO: 85 - DNA, 20 bp, Artificial Sequence
  synthetic construct
ccaccagatgcacaaaatcc

SEQ ID NO: 86 - DNA, 20 bp, Artificial Sequence
  synthetic construct
tttgcttggtttgatttccc

SEQ ID NO: 87 - DNA, 20 bp, Artificial Sequence
  synthetic construct
gaaggttcatatgacggggc

SEQ ID NO: 88 - DNA, 21 bp, Artificial Sequence
  synthetic construct
atgactgctttcttggacccc

SEQ ID NO: 89 - DNA, 20 bp, Artificial Sequence
  synthetic construct
tctgaccagggtcctattcc

SEQ ID NO: 90 - DNA, 20 bp, Artificial Sequence
  synthetic construct
catgattgctttcacaagcg

SEQ ID NO: 91 - DNA, 20 bp, Artificial Sequence
  synthetic construct
attggatcctcttgcttggg

SEQ ID NO: 92 - DNA, 20 bp, Artificial Sequence
  synthetic construct
tgtccctgattcctctaccc

SEQ ID NO: 93 - DNA, 20 bp, Artificial Sequence
  synthetic construct
atgcaaaatgcttctcaggc

SEQ ID NO: 94 - DNA, 23 bp, Artificial Sequence
  synthetic construct
aaaagcttgttcaaaataaatgg

SEQ ID NO: 95 - DNA, 21 bp, Artificial Sequence
  synthetic construct
tctgtaccacttcttccaggg

SEQ ID NO: 96 - DNA, 20 bp, Artificial Sequence
  synthetic construct
tttatgccagtccaacctgc

SEQ ID NO: 97 - DNA, 20 bp, Artificial Sequence
  synthetic construct
tatttttggaaggtgggagg

SEQ ID NO: 98 - DNA, 20 bp, Artificial Sequence
  synthetic construct
cgaatcctttgatcctgagc

SEQ ID NO: 99 - DNA, 20 bp, Artificial Sequence
  synthetic construct
ttgatgagaccaaaagctgg

SEQ ID NO: 100 - DNA, 20 bp, Artificial Sequence
  synthetic construct
agagcatggagcttgtctgc

SEQ ID NO: 101 - DNA, 20 bp, Artificial Sequence
  synthetic construct
aagcactttgcatttgaggg

SEQ ID NO: 102 - DNA, 21 bp, Artificial Sequence
  synthetic construct
tggagatcttcgagctttacc

SEQ ID NO: 103 - DNA, 19 bp, Artificial Sequence
  synthetic construct
ggaccccagtttcttcagc

SEQ ID NO: 104 - DNA, 20 bp, Artificial Sequence
  synthetic construct
agtgggaagtggagaggagg

SEQ ID NO: 105 - DNA, 21 bp, Artificial Sequence
  synthetic construct
gtatgccataaagcctttatg

SEQ ID NO: 106 - DNA, 20 bp, Artificial Sequence
  synthetic construct
gttctaatcccagtagaagg

SEQ ID NO: 107 - DNA, 20 bp, Artificial Sequence
  synthetic construct
ccacagcttcacacacacat

SEQ ID NO: 108 - DNA, 20 bp, Artificial Sequence
  synthetic construct
tctatgagccttgacactac

SEQ ID NO: 109 - DNA, 20 bp, Artificial Sequence
  synthetic construct
ttcccacttcttcttggtgc

SEQ ID NO: 110 - DNA, 20 bp, Artificial Sequence
  synthetic construct
tgggcatttaggttgactcc

SEQ ID NO: 111 - DNA, 20 bp, Artificial Sequence
  synthetic construct
tcatgccactacactccagc

SEQ ID NO: 112 - DNA, 20 bp, Artificial Sequence
  synthetic construct
ctgcccataaccaaacttcc

SEQ ID NO: 113 - DNA, 20 bp, Artificial Sequence
  synthetic construct
gggtgacagagcaagactcc

SEQ ID NO: 114 - DNA, 20 bp, Artificial Sequence
  synthetic construct
aaaaggcttgggaatcaagg

SEQ ID NO: 115 - DNA, 20 bp, Artificial Sequence
  synthetic construct
agatgtcccagatgcgtagg

SEQ ID NO: 116 - DNA, 20 bp, Artificial Sequence
  synthetic construct
gctttcatgcaggtttctcc

SEQ ID NO: 117 - DNA, 20 bp, Artificial Sequence
  synthetic construct
tattttctgcagctgctccc

SEQ ID NO: 118 - DNA, 21 bp, Artificial Sequence
  synthetic construct
ctttcaacaattgcatcctcc

SEQ ID NO: 119 - DNA, 21 bp, Artificial Sequence
  synthetic construct
gaggggcacattcttatctcc

SEQ ID NO: 120 - DNA, 20 bp, Artificial Sequence
  synthetic construct
tcatagtgaaggggtcaggc

SEQ ID NO: 121 - DNA, 20 bp, Artificial Sequence
  synthetic construct
caccacacaataggatcccc

SEQ ID NO: 122 - DNA, 20 bp, Artificial Sequence
  synthetic construct
gtcaatgggaaaagaatgcc

SEQ ID NO: 123 - DNA, 20 bp, Artificial Sequence
  synthetic construct
caatccacaaatgatgcagg

SEQ ID NO: 124 - DNA, 20 bp, Artificial Sequence
  synthetic construct
agtgccaggattacaggcat

SEQ ID NO: 125 - DNA, 24 bp, Artificial Sequence
  synthetic construct
gaatttaatctctgatttctctac

SEQ ID NO: 126 - DNA, 22 bp, Artificial Sequence
  synthetic construct
gagtgaatgtgatacatttccc

SEQ ID NO: 127 - DNA, 23 bp, Artificial Sequence
  synthetic construct
taaaaataggttaaaataaagtg

SEQ ID NO: 128 - DNA, 23 bp, Artificial Sequence
  synthetic construct
tttaaatgactaattacatacca

SEQ ID NO: 129 - DNA, 20 bp, Artificial Sequence
  synthetic construct
tcagggttggttactggagc

SEQ ID NO: 130 - DNA, 20 bp, Artificial Sequence
  synthetic construct
acactaccatggtcttgggg

SEQ ID NO: 131 - DNA, 20 bp, Artificial Sequence
  synthetic construct
agtcagtgggcctgttatgg

SEQ ID NO: 132 - DNA, 20 bp, Artificial Sequence
  synthetic construct
gtccctagctcttgttcccc

SEQ ID NO: 133 - DNA, 20 bp, Artificial Sequence
  synthetic construct
tgggcagatagggatagtgg

SEQ ID NO: 134 - DNA, 20 bp, Artificial Sequence
  synthetic construct
tttgtgcgtttctcaacagc
